(19) United States
(12) Patent Application Publication
(10) Pub. No.: US 2024/0360234 A1
(43) Pub. Date: Oct. 31, 2024

(54) GENETICALLY MODIFIED NATURAL KILLER CELLS FOR CD70-DIRECTED CANCER IMMUNOTHERAPY

(71) Applicant: Nkarta, Inc., South San Francisco, CA (US)

(72) Inventors: James Barnaby Trager, Albany, CA (US); Alexandra Leida Liana Lazetic, San Jose, CA (US); Ivan Chan, Millbrae, CA (US); Chao Guo, San Francisco, CA (US); Katherine Jamboretz, San Francisco, CA (US)

(21) Appl. No.: 18/657,550

(22) Filed: May 7, 2024

Related U.S. Application Data
(62) Division of application No. 17/303,952, filed on Jun. 10, 2021, now Pat. No. 12,012,458.
(60) Provisional application No. 63/038,645, filed on Jun. 12, 2020.
(60) Provisional application No. 63/090,041, filed on Oct. 9, 2020.
(60) Provisional application No. 63/141,411, filed on Jan. 25, 2021.
(60) Provisional application No. 63/201,490, filed on Apr. 30, 2021.

(51) Int. Cl. C07K 16/28; C07K 14/705; C07K 14/715; C07K 14/725; C12N 15/90

(52) U.S. Cl. CPC C07K 16/2875; C07K 14/7051; C07K 14/70578; C07K 14/7155; C12N 15/907; C07K 2317/622; C07K 2319/02; C07K 2319/03; C12N 2310/20; C12N 2800/80

(57) ABSTRACT

Several embodiments of the methods and compositions disclosed herein relate to immune cells that are engineered to express chimeric antigen receptors (CAR) and/or genetically modified to reduce potential side effects of cellular immunotherapy. Several embodiments relate to genetic modifications to the immune cells, such as Natural Killer (NK) cells, to reduce, substantially, reduce, or eliminate expression of a marker by the immune cells that would otherwise cause them to be self-targeted by the CAR. In several embodiments, the CAR targets CD70, and in some embodiments is used for renal cell carcinoma immunotherapy.

### RELATED CASES

[0001] This application is a divisional application of U.S. patent application Ser. No. 17/303,952, filed Jun. 10, 2021, which claims priority to U.S. Provisional Patent Application No. 63/038,645, filed Jun. 12, 2020, U.S. Provisional Patent Application No. 63/090,041, filed Oct. 9, 2020, U.S. Provisional Patent Application No. 63/141,411, filed Jan. 25, 2021, and, U.S. Provisional Patent Application No. 63/201,490, filed Apr. 30, 2021, the entire contents of each of which is incorporated by reference herein.

### FIELD

[0002] Several embodiments disclosed herein relate to methods and compositions comprising genetically engineered cells for cancer immunotherapy, in particular cells engineered to have reduced expression of certain markers that are also present on target cells. In several embodiments, the present disclosure relates to cells engineered to express chimeric antigen receptors and have reduced expression of one or more markers that enhance the efficacy and/or reduce potential side effects when the cells are used in cancer immunotherapy

### BACKGROUND

[0003] As further knowledge is gained about various cancers and what characteristics a cancerous cell has that can be used to specifically distinguish that cell from a healthy cell, therapeutics are under development that leverage the distinct features of a cancerous cell. Immunotherapies that employ engineered immune cells are one approach to treating cancers.

### INCORPORATION BY REFERENCE OF MATERIAL IN ASCII TEXT FILE

[0004] This application incorporates by reference the material contained in the Sequence Listing XML file being submitted concurrently herewith: File name: NKT.056D1_ST26.xml; created on May 6, 2024 and is 1,953,038 bytes in size.

### SUMMARY

[0005] Immunotherapy presents a new technological advancement in the treatment of disease, wherein immune cells are engineered to express certain targeting and/or effector molecules that specifically identify and react to diseased or damaged cells. This represents a promising advance due, at least in part, to the potential for specifically targeting diseased or damaged cells, as opposed to more traditional approaches, such as chemotherapy, where all cells are impacted, and the desired outcome is that sufficient healthy cells survive to allow the patient to live. One immunotherapy approach is the recombinant expression of chimeric receptors in immune cells to achieve the targeted recognition and destruction of aberrant cells of interest.

[0006] In some instances a population of immune cells for immunotherapy may express one or more endogenous markers that overlap in scope with those expressed by a tumor cell population. Targeting such a common marker can limit the efficacy of the therapeutic cells, insofar as the therapeutic cells target both the tumor population and other members of the therapeutic cell population. Therefore, in several embodiments, there is provided a population of genetically engineered immune cells, such as natural killer (NK) cells, T cells or combinations thereof, for cancer immunotherapy, comprising a plurality of immune cells that have been expanded in culture, wherein the plurality of immune cells are engineered to express a chimeric antigen receptor (CAR) comprising a tumor binding domain, a transmembrane domain, and a cytotoxic signaling complex, wherein the tumor binding domain targets CD70, wherein the immune cells are genetically edited to express reduced levels of CD70 as compared to a non-edited immune cell that has been expanded in culture, and wherein the reduced CD70 expression was engineered through editing of an endogenous CD70 gene.

[0007] In several embodiments, the cells are genetically edited to express reduced levels of a cytokine-inducible SH2-containing (CIS) protein encoded by a CISH gene as compared to a non-edited cell. In several embodiments, the reduced (e.g., diminished, eliminated or otherwise non-detectable) CIS expression was achieved through editing of a CISH gene. Such editing imparts to the edited cells one or more of enhanced expansion capability, enhanced cytotoxicity against target cells, and enhanced persistence, as compared to cells expressing native levels of CIS. In several embodiments, additional edits are made to the cells, such as editing to yield reduced expression levels of an adenosine receptor. In several embodiments, the reduced adenosine receptor expression is achieved through editing of one or more genes encoding said adenosine receptor which results in one or more of enhanced expansion capability, enhanced cytotoxicity against target cells, and enhanced persistence, as compared to cells expressing native levels the adenosine receptor. In several embodiments, the editing and engineering of the cells works in concert in that the polynucleotide encoding the CAR is inserted into the gene that is edited. However, in several embodiments, the editing site does not include the polynucleotide encoding the CAR.

[0008] In several embodiments, the tumor binding domain of the CAR comprises a heavy chain variable region (VH), wherein the VH is encoded by a polynucleotide comprising a sequence having at least at least 80%, at least 85%, at least 90%, or at least 95% sequence identity to one or more of the polynucleotides of SEQ ID NOs: 1104, 1053, 1091, 1047, 1106, 1052, 1077, 1064, 1098, and 1088. In several embodiments, the tumor binding domain of the CAR comprises a light chain variable region (VL), wherein the VL is encoded by a polynucleotide comprising a sequence having at least at least 80%, at least 85%, at least 90%, or at least 95% sequence identity to one or more of the polynucleotides of SEQ ID NOs: 1178, 1127, 1165, 1121, 1180, 1126, 1151, 1138, 1171, and 1162. In several embodiments, the tumor binding domain comprises a single chain variable fragment (scFv), wherein the scFv is encoded by a polynucleotide comprising a sequence having at least at least 80%, at least 85%, at least 90%, or at least 95% sequence identity to one or more of the polynucleotides of SEQ ID NOs: 104, 53, 91, 47, 106, 52, 77, 64, 98, and 88.

[0009] In several embodiments, the tumor binding domain comprises a heavy chain variable region and a light chain variable region, wherein the heavy chain variable region comprises a CDR-H1, CDR-H2, and CDR-H3, and the light chain variable region comprises a CDR-L1, CDR-L2, and CDR-L3, and wherein the CDR-H1 comprises a sequence having at least at least 80%, at least 85%, at least 90%, or at least 95% sequence identity to one or more sequences selected from SEQ ID NOs: 494, 443, 481, 437, 496, 442, 467, 454, 488, and 478; the CDR-H2 comprises a sequence having at least at least 80%, at least 85%, at least 90%, or at least 95% sequence identity to one or more sequences selected from SEQ ID NOs: 568, 517, 555, 511, 570, 516, 541, 528, 562, and 552; the CDR-H3 comprises a sequence having at least at least 80%, at least 85%, at least 90%, or at least 95% sequence identity to one or more sequences selected from SEQ ID NOs: 642, 591, 629, 585, 644, 590, 615, 602, 636, and 626; the CDR-L1 comprises a sequence having at least at least 80%, at least 85%, at least 90%, or at least 95% sequence identity to one or more sequences selected from SEQ ID NOs: 734, 683, 721, 677, 736, 682, 707, 694, 728, and 718; the CDR-L2 comprises a sequence having at least at least 80%, at least 85%, at least 90%, or at least 95% sequence identity to one or more sequences selected from SEQ ID NOs: 808, 757, 795, 751, 810, 756, 781, 768, 802, and 792; and the CDR-L3 comprises a sequence having at least at least 80%, at least 85%, at least 90%, or at least 95% sequence identity to one or more sequences selected from SEQ ID NOs: 882, 831, 869, 825, 884, 830, 855, 842, 876, and 855.

[0010] In several embodiments, the tumor binding domain comprises a VH, wherein the VH comprises an amino acid sequence having at least at least 80%, at least 85%, at least 90%, or at least 95% sequence identity to one or more of the amino acid sequences of SEQ ID NOs: 956, 905, 943, 899, 958, 904, 929, 916, 950, and 940. In several embodiments, the tumor binding domain comprises a VL, wherein the VL comprises an amino acid sequence having at least at least 80%, at least 85%, at least 90%, or at least 95% sequence identity to one or more of the amino acid sequences of SEQ ID NOs: 1030, 979, 1017, 973, 1032, 978, 1003, 990, 1024, and 1014.

[0011] In several embodiments, the tumor binding domain comprises an scFv, wherein the scFv comprises an amino acid sequence having at least 80%, at least 85%, at least 90%, or at least 95% sequence identity to one or more of the amino acid sequences of SEQ ID NOs: 296, 245, 283, 239, 298, 244, 269, 256, 290, 280.

[0012] In several embodiments, the immune cells are engineered to express membrane bound IL-15 (mbIL15). In several embodiments, the mbIL15 is bicistronically encoded on a polynucleotide encoding the CAR. In several embodiments, the polynucleotide encoding the CAR and the mbIL15 comprises a sequence having at least 80%, at least 85%, at least 90%, or at least 95% sequence identity to one or more of the polynucleotides of SEQ ID NOs: 204, 153, 191, 147, 206, 152, 177, 164, 198, and 188. In several embodiments, the CAR comprises an amino acid sequence having at least 80%, at least 85%, at least 90%, or at least 95% sequence identity to one or more of the amino acid sequences of SEQ ID NOs: 379, 328, 366, 322, 381, 327, 352, 339, 373, and 363. In several embodiments, the mbIL15 is encoded by a sequence having at least 80%, at least 85%, at least 90%, or at least 95% sequence identity to SEQ ID NO: 1188.

[0013] In several embodiments, the cytotoxic signaling complex comprises an OX-40 subdomain and a CD3zeta subdomain. In several embodiments, the OX40 subdomain is encoded by a sequence having at least 80%, at least 85%, at least 90%, or at least 95% sequence identity to SEQ ID NO: 5. In several embodiments, the CD3zeta subdomain is encoded by a sequence having at least 80%, at least 85%, at least 90%, or at least 95% sequence identity to SEQ ID NO: 7.

[0014] In several embodiments, the expression of CIS by the edits cells is substantially reduced as compared to a cell not edited with respect to CISH. In several embodiments, the edited cells do not express a detectable level of CIS protein. In several embodiments, the expression of the adenosine receptor is substantially reduced as compared to a cell not edited with respect the adenosine receptor. In several embodiments, the edited cells do not express a detectable level of an adenosine receptor. In several embodiments, the edited adenosine receptor comprises one or more of an A2A adenosine receptor, an A2B adenosine receptor, an A3 adenosine receptor, or an A1 adenosine receptor. In several embodiments, the edited adenosine receptor comprises an A2A adenosine receptor (A2AR). In several embodiments, the cells are further genetically edited to express a reduced level of one or more of a transforming growth factor beta receptor (TGFBR), beta-2 microglobulin (B2M), CIITA (class II major histocompatibility complex transactivator), Natural Killer Group 2, member A (NKG2A) receptor, Cbl proto-oncogene B protein encoded by a CBLB gene, tripartite motif-containing protein 29 protein encoded by a TRIM29 gene, and a suppressor of cytokine signaling 2 protein encoded by a SOCS2 gene as compared to a non-edited NK cell. In several embodiments, the gene editing to reduce expression or the gene editing to induce expression is made using a CRISPR-Cas system. In several embodiments, the CRISPR-Cas system comprises a Cas selected from Cas9, Csn2, Cas4, Cpf1, C2c1, C2c3, Cas13a, Cas13b, Cas13c, CasX, CasY, and combinations thereof. In one embodiment the Cas is Cas9 (optionally reduced activity Cas9).

[0015] In several embodiments, the Cas is guided to the CD70 gene by one or more guide RNA having at least 80%, at least 85%, at least 90%, or at least 95% sequence identity to SEQ ID NO: 121, SEQ ID NO: 122, or SEQ ID NO: 123. In several embodiments, the Cas is guided to the CISH gene by one or more guide RNA having at least 80%, at least 85%, at least 90%, or at least 95% sequence identity to SEQ ID NO: 130, SEQ ID NO: 131, SEQ ID NO: 132, SEQ ID NO: 133, or SEQ ID NO: 134. In several embodiments, the Cas is guided to the adenosine receptor gene by one or more guide RNA having at least 80%, at least 85%, at least 90%, or at least 95% sequence identity to SEQ ID NO: 396, SEQ ID NO: 397, or SEQ ID NO: 398. In several embodiments, the Cas is guided to the TGFBR2 gene by one or more guide RNA having at least 80%, at least 85%, at least 90%, or at least 95% sequence identity to SEQ ID NO: 130, SEQ ID NO: 131, SEQ ID NO: 132, SEQ ID NO: 133, or SEQ ID NO: 134.

[0016] In several embodiments, the gene editing to reduce expression or the gene editing to induce expression is made using a zinc finger nuclease (ZFN). In alternative embodiments, the gene editing to reduce expression or the gene editing to induce expression is made using a Transcription activator-like effector nuclease (TALEN).

[0017] In several embodiments, the immune cells that are engineered and edited comprise NK cells. In several embodiments, the immune cells that are engineered and edited consist of or consist essentially of NK cells.

[0018] In several embodiments, there are provided for herein methods of treating cancer in a subject, comprising administering to the subject the population of genetically engineered and edited immune cells, such as NK cells, as provided for herein. In several embodiments, the cancer is renal cell carcinoma, or a metastasis from renal cell carcinoma. Also provided for herein is a use of the genetically engineered and edited immune cells, such as NK cells, as provided for herein, in the treatment of cancer. Additionally provided is a use of the genetically engineered and edited immune cells, such as NK cells, as provided for herein in the manufacture of a medicament for the treatment of cancer.

[0019] Additionally provided for herein are methods for treating cancer in a subject comprising, administering to the subject a population of genetically engineered immune cells, comprising a plurality of immune cells, such as NK cells, T cells, or combinations thereof, that have been expanded in culture, wherein the plurality of NK cells is engineered to express a chimeric antigen receptor (CAR) comprising a tumor binding domain, a transmembrane domain, and a cytotoxic signaling complex, wherein the tumor binding domain targets CD70, and wherein the cells are genetically edited to express reduced levels of CD70 as compared to a non-edited cell that has been expanded in culture, and wherein the reduced CD70 expression was engineered through editing of an endogenous CD70 gene.

[0020] In several embodiments, the cells are further genetically edited to express reduced levels of a cytokine-inducible SH2-containing (CIS) protein encoded by a CISH gene as compared to a non-edited cell, wherein the reduced CIS expression was engineered through editing of a CISH gene and wherein the genetically edited cells exhibit one or more of enhanced expansion capability, enhanced cytotoxicity against target cells, and enhanced persistence, as compared to cells expressing native levels of CIS. In several embodiments, the cells are also genetically edited to express reduced expression of an adenosine receptor, wherein the reduced adenosine receptor expression was achieved through editing of a gene encoding said adenosine receptor, and wherein the genetically edited cells exhibit one or more of enhanced expansion capability, enhanced cytotoxicity against target cells, and enhanced persistence, as compared to cells expressing native levels the adenosine receptor.

[0021] In several embodiments, the tumor binding domain comprises a heavy chain variable region (VH), wherein the VH is encoded by a polynucleotide comprising a sequence having at least 80%, at least 85%, at least 90%, or at least 95% sequence identity to one or more of the polynucleotides of SEQ ID NOs: 1104, 1053, 1091, 1047, 1106, 1052, 1077, 1064, 1098, and 1088 and wherein the tumor binding domain comprises a light chain variable region (VL), wherein the VL is encoded by a polynucleotide comprising a sequence having at least 80%, at least 85%, at least 90%, or at least 95% sequence identity to one or more of the polynucleotides of SEQ ID NOs: 1178, 1127, 1165, 1121, 1180, 1126, 1151, 1138, 1171, and 1162.

[0022] In several embodiments of these methods, the tumor binding domain comprises a single chain variable fragment (scFv), wherein the scFv is encoded by a polynucleotide comprising a sequence having at least 80%, at least 85%, at least 90%, or at least 95% sequence identity to one or more of the polynucleotides of SEQ ID NOs: 104, 53, 91, 47, 106, 52, 77, 64, 98, and 88. In several embodiments of these methods, the tumor binding domain comprises a heavy chain variable region and a light chain variable region, wherein the heavy chain variable region comprises a CDR-H1, CDR-H2, and CDR-H3, and the light chain variable region comprises a CDR-L1, CDR-L2, and CDR-L3, and wherein the CDR-H1 comprises a sequence having at least 80%, at least 85%, at least 90%, or at least 95% sequence identity to one or more sequences selected from SEQ ID NOs: 494, 443, 481, 437, 496, 442, 467, 454, 488, and 478; the CDR-H2 comprises a sequence having at least 80%, at least 85%, at least 90%, or at least 95% sequence identity to one or more sequences selected from SEQ ID NOs: 568, 517, 555, 511, 570, 516, 541, 528, 562, and 552; the CDR-H3 comprises a sequence having at least 80%, at least 85%, at least 90%, or at least 95% sequence identity to one or more sequences selected from SEQ ID NOs: 642, 591, 629, 585, 644, 590, 615, 602, 636, and 626; the CDR-L1 comprises a sequence having at least 80%, at least 85%, at least 90%, or at least 95% sequence identity to one or more sequences selected from SEQ ID NOs: 734, 683, 721, 677, 736, 682, 707, 694, 728, and 718; the CDR-L2 comprises a sequence having at least 80%, at least 85%, at least 90%, or at least 95% sequence identity to one or more sequences selected from SEQ ID NOs: 808, 757, 795, 751, 810, 756, 781, 768, 802, and 792; and the CDR-L3 comprises a sequence having at least 80%, at least 85%, at least 90%, or at least 95% sequence identity to one or more sequences selected from SEQ ID NOs: 882, 831, 869, 825, 884, 830, 855, 842, 876, and 855.

[0023] In several embodiments of these methods, the tumor binding domain comprises a VH, wherein the VH comprises an amino acid sequence having at least 80%, at least 85%, at least 90%, or at least 95% sequence identity to one or more of the amino acid sequences of SEQ ID NOs: 956, 905, 943, 899, 958, 904, 929, 916, 950, and 940 and wherein the tumor binding domain comprises a VL, wherein the VL comprises an amino acid sequence having at least 80%, at least 85%, at least 90%, or at least 95% sequence identity to one or more of the amino acid sequences of SEQ ID NOs: 1030, 979, 1017, 973, 1032, 978, 1003, 990, 1024, and 1014. In several embodiments of these methods, the tumor binding domain comprises an scFv, wherein the scFv comprises an amino acid sequence having at least 80%, at least 85%, at least 90%, or at least 95% sequence identity to one or more of the amino acid sequences of SEQ ID NOs: 296, 245, 283, 239, 298, 244, 269, 256, 290, 280.

[0024] In several embodiments of these methods, the chimeric antigen receptor comprises an OX40 subdomain and a CD3zeta subdomain and the cells are engineered to express membrane bound IL-15 (mbIL15). In several embodiments, the mbIL15 is bicistronically encoded on a polynucleotide encoding the CAR. In several embodiments, the polynucleotide encoding the CAR and the mbIL15 comprises a sequence having at least 80%, at least 85%, at least 90%, or at least 95% sequence identity to one or more of the polynucleotides of SEQ ID NOs: 204, 153, 191, 147, 206, 152, 177, 164, 198, and 188. In several embodiments, the CAR comprises an amino acid sequence having at least 80%, at least 85%, at least 90%, or at least 95% sequence identity to one or more of the amino acid sequences of SEQ ID NOs: 379, 328, 366, 322, 381, 327, 352, 339, 373, and 363. In several embodiments, the OX40 subdomain is encoded by a sequence having at least 80%, at least 85%, at least 90%, or at least 95% sequence identity to SEQ ID NO: 5, wherein the CD3zeta subdomain is encoded by a sequence having at least 80%, at least 85%, at least 90%, or at least 95% sequence identity to SEQ ID NO: 7, and wherein the mbIL15 is encoded by a sequence having at least 80%, at least 85%, at least 90%, or at least 95% sequence identity to SEQ ID NO: 1188.

[0025] In several embodiments, expression of CIS is substantially reduced as compared to a cell not edited with respect to CISH and/or wherein the cells do not express a detectable level of CIS protein. In several embodiments, expression of the adenosine receptor is substantially reduced as compared to a cell not edited with respect the adenosine receptor and/or wherein the cells do not express a detectable level of an adenosine receptor. In several embodiments, the adenosine receptor comprises an A2A adenosine receptor, an A2B adenosine receptor, an A3 adenosine receptor, or an A1 adenosine receptor. In several embodiments, the gene editing is made using a CRISPR-Cas system, and wherein the Cas comprises a Cas9 enzyme. In several embodiments, the immune cells that are engineered and edited comprise NK cells. In several embodiments, the immune cells that are engineered and edited consist of or consist essentially of NK cells.

[0026] Also provided for herein is a polynucleotide encoding an anti-CD70 chimeric antigen receptor, wherein the CAR comprises an anti-CD70 binding domain, wherein the anti-CD70 binding domain is encoded by a polynucleotide comprising a sequence having at least 95% sequence identity to one or more of SEQ ID NOs: 36-120, 221-229, 1038-1111, 1112-1185, and/or comprises an amino acid sequence having at least 95% sequence identity to one or more of the amino acid sequences of SEQ ID NO: 230-312, 890-963, 964-1037, or a portion thereof capable of generating cytotoxic signals upon binding to CD70 on a target cell. In several embodiments, the polynucleotide further encodes an OX40 domain, wherein the OX40 subdomain is encoded by a sequence having at least 85%, at least 90%, or at least 95% sequence identity to SEQ ID NO: 5, and a CD3zeta domain, wherein the CD3zeta subdomain is encoded by a sequence having at least 85%, at least 90%, or at least 95% sequence identity to SEQ ID NO: 7. In several embodiments, the polynucleotide further encodes mbIL15, wherein the mbIL15 is encoded by a sequence having at least 85%, at least 90%, or at least 95% sequence identity to SEQ ID NO: 1188. In several embodiments, the one or more of SEQ ID NOs: 36-120, 221-229, 1038-1111, or 1112-1185, the polynucleotide encoding OX40, the polynucleotide encoding CD3zeta, and the polynucleotide encoding mbIL15 are arranged in a 5′ to 3′ orientation within the polynucleotide.

[0027] Additionally provided for herein is a method of enhancing the persistence of a population of immune cells to be used in cancer immunotherapy, comprising identifying a target marker on a tumor to be treated, determining if a population of immune cells to be engineered to express a CAR that binds the target marker also endogenously expresses the target marker; editing the genome of the population of immune cells to disrupt the gene encoding the endogenous target marker, and engineering the population of immune cells to express the CAR, wherein the disruption of the endogenous expression of the target marker by the immune cells reduces the ability of the CAR to bind the endogenous target marker on the immune cells, thereby enhancing the persistence of the population of immune cells. In several embodiments, the immune cells are NK cells, T cells, or a combination thereof, wherein the target marker is CD70, and wherein the gene editing is made using a CRISPR-Cas system.

[0028] In several embodiments, the method further comprises using a CRISPR-Cas system to disrupt expression of a cytokine-inducible SH2-containing (CIS) protein encoded by a CISH gene and/or further comprising using a CRISPR-Cas system to disrupt expression of an adenosine receptor, wherein the adenosine receptor comprises an A2A adenosine receptor, an A2B adenosine receptor, an A3 adenosine receptor, and/or an A1 adenosine receptor.

[0029] Provided for herein, in several embodiments, is an anti-CD70 chimeric antigen receptor (CAR), wherein the CAR comprises an anti-CD70 binding domain, an OX40 domain, and a CD3zeta domain, wherein the anti-CD70 CAR is encoded by a polynucleotide having at least 85%, at least 90%, or at least 95% sequence identity to one or more of SEQ ID NOS: 138-220. Also provided for herein is an anti-CD70 chimeric antigen receptor (CAR), wherein the CAR comprises an anti-CD70 binding domain, an OX40 domain, and a CD3zeta domain wherein the anti-CD70 CAR comprises an amino acid sequence having at least 85%, at least 90%, or at least 95% sequence identity to one or more of the amino acid sequences of SEQ ID NOs: 313-395, or a portion thereof capable of generating cytotoxic signals upon binding to CD70 on a target cell.

[0030] Additionally provided for herein is an anti-CD70 binding domain comprising a heavy chain variable region and a light chain variable region, wherein the heavy chain variable region comprises a CDR-H1, CDR-H2, and CDR-H3, and the light chain variable region comprises a CDR-L1, CDR-L2, and CDR-L3, and wherein: the CDR-H1 comprises a sequence having at least 80%, 85%, 90%, 95%, 99%, or 100% sequence identity to a sequence selected from SEQ ID NOs: 428-501; the CDR-H2 comprises a sequence having at least 80%, 85%, 90%, 95%, 99%, or 100% sequence identity to a sequence selected from SEQ ID NOs: 502-575; the CDR-H3 comprises a sequence having at least 80%, 85%, 90%, 95%, 99%, or 100% sequence identity to a sequence selected from SEQ ID NOs: 576-649; the CDR-L1 comprises a sequence having at least 80%, 85%, 90%, 95%, 99%, or 100% sequence identity to a sequence selected from SEQ ID NOS: 668-741; the CDR-L2 comprises a sequence having at least 80%, 85%, 90%, 95%, 99%, or 100% sequence identity to a sequence selected from SEQ ID NOs: 742-815; and the CDR-L3 comprises a sequence having at least 80%, 85%, 90%, 95%, 99%, or 100% sequence identity to a sequence selected from SEQ ID NOs: 816-889. In several embodiments, the heavy chain variable domain is encoded by a nucleic acid sequence having at least 80%, 85%, 90%, 95%, 99%, or 100% sequence identity to any sequence selected from SEQ ID NOs: 1038-1111. In several embodiments, the light chain variable domain is encoded by a nucleic acid sequence having at least 80%, 85%, 90%, 95%, 99%, or 100% sequence identity to any sequence selected from SEQ ID NOs: 1112-1185. Depending on the embodiment, the anti-CD70 binding domain is an antibody, Fab′ fragment, F(ab′)2 fragment, or scFv. In several embodiments, provided for herein is a CAR comprising the anti-CD70 binding domain disclosed herein. In several embodiments, the CAR further comprises an OX40 subdomain and a CD3zeta subdomain. In several embodiments, there are provided cells, such as immune cells, comprising the anti-CD70 binding domain or the CARs provided for herein. In several embodiments, the cell comprises, consists of, or consists essentially of an NK cell. In several embodiments, the wherein the cell is genetically edited to express a reduced level of CISH, an adenosine receptor, A2A adenosine receptor, A2B adenosine receptor, A3 adenosine receptor, A1 adenosine receptor, A2AR, TGFBR, B2M, CIITA, NKG2A, CBLB, TRIM29, SOCS2, SMAD3, MAPKAPK3, CEACAM1, or DDIT4, or any combination thereof, as compared to a non-edited cell. Also provided for are methods of treating cancer in a subject comprising administering to the subject an anti-CD70 binding domain, a CAR, a cell as provided for herein. Also provided are a use of an anti-CD70 binding domain, a CAR, or a cell as provided for herein for the treatment of cancer and/or in the manufacture of a medicament for the treatment of cancer.

[0031] Provided for herein is also a population of genetically engineered immune cells for cancer immunotherapy, comprising a plurality of immune cells that have been expanded in culture, wherein the plurality of immune cells are engineered to express a chimeric antigen receptor (CAR) comprising a tumor binding domain that targets CD70, a transmembrane domain, and a cytotoxic signaling complex, wherein the immune cells are genetically edited to express reduced levels of CD70 as compared to non-edited immune cells that have been expanded in culture, and wherein the reduced CD70 expression was engineered through editing of an endogenous CD70 gene. In several embodiments, the population of immune cells comprises, consists of, or consists essentially of a population of NK cells.

[0032] Also provided in several embodiments, is a method of making a population of genetically engineered immune cells for cancer immunotherapy, comprising engineering a population of immune cells to express a CAR that binds a target marker, wherein at least a portion of the population of immune cells also endogenously expresses the target marker; and editing the genome of the population of immune cells to disrupt the gene encoding the endogenous target marker, wherein the disruption of the endogenous expression of the target marker by the immune cells reduces the ability of the CAR to bind the endogenous target marker on the immune cells. In several embodiments, the population of immune cells comprises, consists of, or consists essentially of a population of NK cells.

[0033] In several embodiments, there is provided herein a population of genetically engineered natural killer (NK) cells for cancer immunotherapy, comprising a plurality of NK cells that have been expanded in culture, wherein the plurality of NK cells are engineered to express a chimeric antigen receptor (CAR) comprising a tumor binding domain, a transmembrane domain, and a cytotoxic signaling complex, wherein the tumor binding domain targets CD70. In several embodiments, the NK cells are genetically edited to express reduced levels of CD70 as compared to a non-edited NK cell that has been expanded in culture, and wherein the reduced CD70 expression was engineered through editing of an endogenous CD70 gene.

[0034] In several embodiments, there are provided methods for treating cancer in a subject comprising, administering to the subject a population of genetically engineered immune cells, comprising a plurality of NK cells that have been expanded in culture, wherein the plurality of NK cells are engineered to express a chimeric antigen receptor (CAR) comprising a tumor binding domain, a transmembrane domain, and a cytotoxic signaling complex, wherein the tumor binding domain targets CD70, wherein the chimeric antigen receptor comprises an OX40 subdomain and a CD3zeta subdomain, wherein the NK cells are genetically edited to express reduced levels of CD70 as compared to a non-edited NK cell that has been expanded in culture, and wherein the reduced CD70 expression was engineered through editing of an endogenous CD70 gene.

[0035] In several embodiments, the chimeric antigen receptor cytotoxic signaling complex comprises an OX40 subdomain and a CD3zeta subdomain. In several embodiments, the cells are also genetically engineered to express membrane bound IL-15.

[0036] In several embodiments, the NK cells are genetically edited to express reduced levels of a cytokine-inducible SH2-containing (CIS) protein encoded by a CISH gene as compared to a non-engineered NK cell, wherein the reduced CIS expression was engineered through editing of a CISH gene, and wherein the genetically engineered NK cells exhibit one or more of enhanced expansion capability, enhanced cytotoxicity against target cells, and enhanced persistence, as compared to NK cells expressing native levels of CIS. In several embodiments, CISH editing results in substantially reduced expression of CIS as compared to a cell not edited for CISH. In several embodiments, the edited cells do not express a detectable levels of CIS.

[0037] In several embodiments, the NK cells are genetically edited to express reduced levels of an adenosine receptor as compared to a non-engineered NK cell, wherein the reduced adenosine receptor expression was engineered through editing of a adenosine receptor encoding gene, and wherein the genetically engineered NK cells exhibit one or more of enhanced expansion capability, enhanced cytotoxicity against target cells, and enhanced persistence, as compared to NK cells expressing native levels of the adenosine receptor. In several embodiments, editing of a gene encoding an adenosine receptor results in substantially reduced expression of the adenosine receptor as compared to a cell not edited for the adenosine receptor. In several embodiments, the edited cells do not express a detectable levels of an adenosine receptor. Depending on the embodiment, the edited gene may encode an A2A adenosine receptor, an A2B adenosine receptor, an A3 adenosine receptor, or an A1 adenosine receptor. In several embodiments, the gene edited encodes an A2A adenosine receptor (A2AR). In some embodiments, more than one of the adenosine receptors are edited.

[0038] In several embodiments, CISH and an adenosine receptor encoding gene are edited, resulting in substantially reduced expression of CIS and the adenosine receptor as compared to a cell not edited for CISH and the adenosine receptor. In several embodiments, the edited cells do not express a detectable levels of CIS or the adenosine receptor.

[0039] In several embodiments, the tumor binding domain is encoded by a polynucleotide comprising a sequence having at least 85%, at least 90%, or at least 95% sequence identity to one or more of the polynucleotides of SEQ ID NO: 36 to SEQ ID NOs: 120, 221-229, 1038-1111, 1112-1185, and/or comprises an amino acid sequence having at least 85%, at least 90%, or at least 95% sequence identity to one or more of the amino acid sequences of SEQ ID NO: 230-312, 890-963, 964-1037. In several embodiments, the OX40 subdomain is encoded by a sequence having at least 85%, at least 90%, or at least 95% sequence identity to SEQ ID NO: 5. In several embodiments, the OX40 subdomains comprise an amino acid sequence having at least 85%, at least 90%, or at least 95% sequence identity to SEQ ID NO: 6. In several embodiments, the CD3zeta subdomain is encoded by a sequence having at least 85%, at least 90%, at least 95% sequence identity to SEQ ID NO: 7. In several embodiments, the CD3zeta subdomain comprises an amino acid sequence having at least 85%, at least 90%, or at least 95% sequence identity to SEQ ID NO: 8.

[0040] In several embodiments, there is provided for herein, an anti-CD70 binding domain comprising a heavy chain variable region and a light chain variable region, wherein the heavy chain variable region comprises a CDR-H1, CDR-H2, and CDR-H3, and the light chain variable region comprises a CDR-L1, CDR-L2, and CDR-L3, and wherein the CDR-H1 comprises a sequence having at least 90%, 95%, 99%, or 100% sequence identity to a sequence selected from SEQ ID NOs: 428-501, the CDR-H2 comprises a sequence having at least 90%, 95%, 99%, or 100% sequence identity to a sequence selected from SEQ ID NOs: 502-575, the CDR-H3 comprises a sequence having at least 90%, 95%, 99%, or 100% sequence identity to a sequence selected from SEQ ID NOs: 576-649, the CDR-L1 comprises a sequence having at least 90%, 95%, 99%, or 100% sequence identity to a sequence selected from SEQ ID NOs: 668-741, the CDR-L2 comprises a sequence having at least 90%, 95%, 99%, or 100% sequence identity to a sequence selected from SEQ ID NOs: 742-815, and the CDR-L3 comprises a sequence having at least 90%, 95%, 99%, or 100% sequence identity to a sequence selected from SEQ ID NOs: 816-889. In several embodiments, the heavy chain variable region comprises an amino acid sequence having at least 90%, 95%, 99%, or 100% sequence identity to any sequence selected from SEQ ID NOs: 890-963. In several embodiments, the light chain variable region comprises an amino acid sequence having at least 95%, 99%, or 100% sequence identity to any sequence selected from SEQ ID NOs: 964-1037. In several embodiments, the: 1) the heavy chain variable region comprises the CDR-H1, CDR-H2, CDR-H3 within SEQ ID NO: 890 and the light chain variable region comprises the CDR-L1, CDR-L2, CDR-L3 within SEQ ID NO: 964; 2) the heavy chain variable region comprises the CDR-H1, CDR-H2, CDR-H3 within SEQ ID NO: 891 and the light chain variable region comprises the CDR-L1, CDR-L2, CDR-L3 within SEQ ID NO: 965; 3) the heavy chain variable region comprises the CDR-H1, CDR-H2, CDR-H3 within SEQ ID NO: 892 and the light chain variable region comprises the CDR-L1, CDR-L2, CDR-L3 within SEQ ID NO: 966; 4) the heavy chain variable region comprises the CDR-H1, CDR-H2, CDR-H3 within SEQ ID NO: 893 and the light chain variable region comprises the CDR-L1, CDR-L2, CDR-L3 within SEQ ID NO: 967; 5) the heavy chain variable region comprises the CDR-H1, CDR-H2, CDR-H3 within SEQ ID NO: 894 and the light chain variable region comprises the CDR-L1, CDR-L2, CDR-L3 within SEQ ID NO: 968; 6) the heavy chain variable region comprises the CDR-H1, CDR-H2, CDR-H3 within SEQ ID NO: 895 and the light chain variable region comprises the CDR-L1, CDR-L2, CDR-L3 within SEQ ID NO: 969; 7) the heavy chain variable region comprises the CDR-H1, CDR-H2, CDR-H3 within SEQ ID NO: 896 and the light chain variable region comprises the CDR-L1, CDR-L2, CDR-L3 within SEQ ID NO: 970; 8) the heavy chain variable region comprises the CDR-H1, CDR-H2, CDR-H3 within SEQ ID NO: 897 and the light chain variable region comprises the CDR-L1, CDR-L2, CDR-L3 within SEQ ID NO: 971; 9) the heavy chain variable region comprises the CDR-H1, CDR-H2, CDR-H3 within SEQ ID NO: 898 and the light chain variable region comprises the CDR-L1, CDR-L2, CDR-L3 within SEQ ID NO: 972; 10) the heavy chain variable region comprises the CDR-H1, CDR-H2, CDR-H3 within SEQ ID NO: 899 and the light chain variable region comprises the CDR-L1, CDR-L2, CDR-L3 within SEQ ID NO: 973; 11) the heavy chain variable region comprises the CDR-H1, CDR-H2, CDR-H3 within SEQ ID NO: 900 and the light chain variable region comprises the CDR-L1, CDR-L2, CDR-L3 within SEQ ID NO: 974; 12) the heavy chain variable region comprises the CDR-H1, CDR-H2, CDR-H3 within SEQ ID NO: 901 and the light chain variable region comprises the CDR-L1, CDR-L2, CDR-L3 within SEQ ID NO: 975; 13) the heavy chain variable region comprises the CDR-H1, CDR-H2, CDR-H3 within SEQ ID NO: 902 and the light chain variable region comprises the CDR-L1, CDR-L2, CDR-L3 within SEQ ID NO: 976; 14) the heavy chain variable region comprises the CDR-H1, CDR-H2, CDR-H3 within SEQ ID NO: 903 and the light chain variable region comprises the CDR-L1, CDR-L2, CDR-L3 within SEQ ID NO: 977; 15) the heavy chain variable region comprises the CDR-H1, CDR-H2, CDR-H3 within SEQ ID NO: 904 and the light chain variable region comprises the CDR-L1, CDR-L2, CDR-L3 within SEQ ID NO: 978; 16) the heavy chain variable region comprises the CDR-H1, CDR-H2, CDR-H3 within SEQ ID NO: 905 and the light chain variable region comprises the CDR-L1, CDR-L2, CDR-L3 within SEQ ID NO: 979; 17) the heavy chain variable region comprises the CDR-H1, CDR-H2, CDR-H3 within SEQ ID NO: 906 and the light chain variable region comprises the CDR-L1, CDR-L2, CDR-L3 within SEQ ID NO: 980; 18) the heavy chain variable region comprises the CDR-H1, CDR-H2, CDR-H3 within SEQ ID NO: 907 and the light chain variable region comprises the CDR-L1, CDR-L2, CDR-L3 within SEQ ID NO: 981; 19) the heavy chain variable region comprises the CDR-H1, CDR-H2, CDR-H3 within SEQ ID NO: 908 and the light chain variable region comprises the CDR-L1, CDR-L2, CDR-L3 within SEQ ID NO: 982; 20) the heavy chain variable region comprises the CDR-H1, CDR-H2, CDR-H3 within SEQ ID NO: 909 and the light chain variable region comprises the CDR-L1, CDR-L2, CDR-L3 within SEQ ID NO: 983; 21) the heavy chain variable region comprises the CDR-H1, CDR-H2, CDR-H3 within SEQ ID NO: 910 and the light chain variable region comprises the CDR-L1, CDR-L2, CDR-L3 within SEQ ID NO: 984; 22) the heavy chain variable region comprises the CDR-H1, CDR-H2, CDR-H3 within SEQ ID NO: 911 and the light chain variable region comprises the CDR-L1, CDR-L2, CDR-L3 within SEQ ID NO: 985; 23) the heavy chain variable region comprises the CDR-H1, CDR-H2, CDR-H3 within SEQ ID NO: 912 and the light chain variable region comprises the CDR-L1, CDR-L2, CDR-L3 within SEQ ID NO: 986; 24) the heavy chain variable region comprises the CDR-H1, CDR-H2, CDR-H3 within SEQ ID NO: 913 and the light chain variable region comprises the CDR-L1, CDR-L2, CDR-L3 within SEQ ID NO: 987; 25) the heavy chain variable region comprises the CDR-H1, CDR-H2, CDR-H3 within SEQ ID NO: 914 and the light chain variable region comprises the CDR-L1, CDR-L2, CDR-L3 within SEQ ID NO: 988; 26) the heavy chain variable region comprises the CDR-H1, CDR-H2, CDR-H3 within SEQ ID NO: 915 and the light chain variable region comprises the CDR-L1, CDR-L2, CDR-L3 within SEQ ID NO: 989; 27) the heavy chain variable region comprises the CDR-H1, CDR-H2, CDR-H3 within SEQ ID NO: 916 and the light chain variable region comprises the CDR-L1, CDR-L2, CDR-L3 within SEQ ID NO: 990; 28) the heavy chain variable region comprises the CDR-H1, CDR-H2, CDR-H3 within SEQ ID NO: 917 and the light chain variable region comprises the CDR-L1, CDR-L2, CDR-L3 within SEQ ID NO: 991; 29) the heavy chain variable region comprises the CDR-H1, CDR-H2, CDR-H3 within SEQ ID NO: 918 and the light chain variable region comprises the CDR-L1, CDR-L2, CDR-L3 within SEQ ID NO: 992; 30) the heavy chain variable region comprises the CDR-H1, CDR-H2, CDR-H3 within SEQ ID NO: 919 and the light chain variable region comprises the CDR-L1, CDR-L2, CDR-L3 within SEQ ID NO: 993; 31) the heavy chain variable region comprises the CDR-H1, CDR-H2, CDR-H3 within SEQ ID NO: 920 and the light chain variable region comprises the CDR-L1, CDR-L2, CDR-L3 within SEQ ID NO: 994; 32) the heavy chain variable region comprises the CDR-H1, CDR-H2, CDR-H3 within SEQ ID NO: 921 and the light chain variable region comprises the CDR-L1, CDR-L2, CDR-L3 within SEQ ID NO: 995; 33) the heavy chain variable region comprises the CDR-H1, CDR-H2, CDR-H3 within SEQ ID NO: 922 and the light chain variable region comprises the CDR-L1, CDR-L2, CDR-L3 within SEQ ID NO: 996; 34) the heavy chain variable region comprises the CDR-H1, CDR-H2, CDR-H3 within SEQ ID NO: 923 and the light chain variable region comprises the CDR-L1, CDR-L2, CDR-L3 within SEQ ID NO: 997; 35) the heavy chain variable region comprises the CDR-H1, CDR-H2, CDR-H3 within SEQ ID NO: 924 and the light chain variable region comprises the CDR-L1, CDR-L2, CDR-L3 within SEQ ID NO: 998; 36) the heavy chain variable region comprises the CDR-H1, CDR-H2, CDR-H3 within SEQ ID NO: 925 and the light chain variable region comprises the CDR-L1, CDR-L2, CDR-L3 within SEQ ID NO: 999; 37) the heavy chain variable region comprises the CDR-H1, CDR-H2, CDR-H3 within SEQ ID NO: 926 and the light chain variable region comprises the CDR-L1, CDR-L2, CDR-L3 within SEQ ID NO: 1000; 38) the heavy chain variable region comprises the CDR-H1, CDR-H2, CDR-H3 within SEQ ID NO: 927 and the light chain variable region comprises the CDR-L1, CDR-L2, CDR-L3 within SEQ ID NO: 1001; 39) the heavy chain variable region comprises the CDR-H1, CDR-H2, CDR-H3 within SEQ ID NO: 928 and the light chain variable region comprises the CDR-L1, CDR-L2, CDR-L3 within SEQ ID NO: 1002; 40) the heavy chain variable region comprises the CDR-H1, CDR-H2, CDR-H3 within SEQ ID NO: 929 and the light chain variable region comprises the CDR-L1, CDR-L2, CDR-L3 within SEQ ID NO: 1003; 41) the heavy chain variable region comprises the CDR-H1, CDR-H2, CDR-H3 within SEQ ID NO: 930 and the light chain variable region comprises the CDR-L1, CDR-L2, CDR-L3 within SEQ ID NO: 1004; 42) the heavy chain variable region comprises the CDR-H1, CDR-H2, CDR-H3 within SEQ ID NO: 931 and the light chain variable region comprises the CDR-L1, CDR-L2, CDR-L3 within SEQ ID NO: 1005; 43) the heavy chain variable region comprises the CDR-H1, CDR-H2, CDR-H3 within SEQ ID NO: 932 and the light chain variable region comprises the CDR-L1, CDR-L2, CDR-L3 within SEQ ID NO: 1006; 44) the heavy chain variable region comprises the CDR-H1, CDR-H2, CDR-H3 within SEQ ID NO: 933 and the light chain variable region comprises the CDR-L1, CDR-L2, CDR-L3 within SEQ ID NO: 1007; 45) the heavy chain variable region comprises the CDR-H1, CDR-H2, CDR-H3 within SEQ ID NO: 934 and the light chain variable region comprises the CDR-L1, CDR-L2, CDR-L3 within SEQ ID NO: 1008; 46) the heavy chain variable region comprises the CDR-H1, CDR-H2, CDR-H3 within SEQ ID NO: 935 and the light chain variable region comprises the CDR-L1, CDR-L2, CDR-L3 within SEQ ID NO: 1009; 47) the heavy chain variable region comprises the CDR-H1, CDR-H2, CDR-H3 within SEQ ID NO: 936 and the light chain variable region comprises the CDR-L1, CDR-L2, CDR-L3 within SEQ ID NO: 1010; 48) the heavy chain variable region comprises the CDR-H1, CDR-H2, CDR-H3 within SEQ ID NO: 937 and the light chain variable region comprises the CDR-L1, CDR-L2, CDR-L3 within SEQ ID NO: 1011; 49) the heavy chain variable region comprises the CDR-H1, CDR-H2, CDR-H3 within SEQ ID NO: 938 and the light chain variable region comprises the CDR-L1, CDR-L2, CDR-L3 within SEQ ID NO: 1012; 50) the heavy chain variable region comprises the CDR-H1, CDR-H2, CDR-H3 within SEQ ID NO: 939 and the light chain variable region comprises the CDR-L1, CDR-L2, CDR-L3 within SEQ ID NO: 1013; 51) the heavy chain variable region comprises the CDR-H1, CDR-H2, CDR-H3 within SEQ ID NO: 940 and the light chain variable region comprises the CDR-L1, CDR-L2, CDR-L3 within SEQ ID NO: 1014; 52) the heavy chain variable region comprises the CDR-H1, CDR-H2, CDR-H3 within SEQ ID NO: 941 and the light chain variable region comprises the CDR-L1, CDR-L2, CDR-L3 within SEQ ID NO: 1015; 53) the heavy chain variable region comprises the CDR-H1, CDR-H2, CDR-H3 within SEQ ID NO: 942 and the light chain variable region comprises the CDR-L1, CDR-L2, CDR-L3 within SEQ ID NO: 1016; 54) the heavy chain variable region comprises the CDR-H1, CDR-H2, CDR-H3 within SEQ ID NO: 943 and the light chain variable region comprises the CDR-L1, CDR-L2, CDR-L3 within SEQ ID NO: 1017; 55) the heavy chain variable region comprises the CDR-H1, CDR-H2, CDR-H3 within SEQ ID NO: 944 and the light chain variable region comprises the CDR-L1, CDR-L2, CDR-L3 within SEQ ID NO: 1018; 56) the heavy chain variable region comprises the CDR-H1, CDR-H2, CDR-H3 within SEQ ID NO: 945 and the light chain variable region comprises the CDR-L1, CDR-L2, CDR-L3 within SEQ ID NO: 1019; 57) the heavy chain variable region comprises the CDR-H1, CDR-H2, CDR-H3 within SEQ ID NO: 946 and the light chain variable region comprises the CDR-L1, CDR-L2, CDR-L3 within SEQ ID NO: 1020; 58) the heavy chain variable region comprises the CDR-H1, CDR-H2, CDR-H3 within SEQ ID NO: 947 and the light chain variable region comprises the CDR-L1, CDR-L2, CDR-L3 within SEQ ID NO: 1021; 59) the heavy chain variable region comprises the CDR-H1, CDR-H2, CDR-H3 within SEQ ID NO: 948 and the light chain variable region comprises the CDR-L1, CDR-L2, CDR-L3 within SEQ ID NO: 1022; 60) the heavy chain variable region comprises the CDR-H1, CDR-H2, CDR-H3 within SEQ ID NO: 949 and the light chain variable region comprises the CDR-L1, CDR-L2, CDR-L3 within SEQ ID NO: 1023; 61) the heavy chain variable region comprises the CDR-H1, CDR-H2, CDR-H3 within SEQ ID NO: 950 and the light chain variable region comprises the CDR-L1, CDR-L2, CDR-L3 within SEQ ID NO: 1024; 62) the heavy chain variable region comprises the CDR-H1, CDR-H2, CDR-H3 within SEQ ID NO: 951 and the light chain variable region comprises the CDR-L1, CDR-L2, CDR-L3 within SEQ ID NO: 1025; 63) the heavy chain variable region comprises the CDR-H1, CDR-H2, CDR-H3 within SEQ ID NO: 952 and the light chain variable region comprises the CDR-L1, CDR-L2, CDR-L3 within SEQ ID NO: 1026; 64) the heavy chain variable region comprises the CDR-H1, CDR-H2, CDR-H3 within SEQ ID NO: 953 and the light chain variable region comprises the CDR-L1, CDR-L2, CDR-L3 within SEQ ID NO: 1027; 65) the heavy chain variable region comprises the CDR-H1, CDR-H2, CDR-H3 within SEQ ID NO: 954 and the light chain variable region comprises the CDR-L1, CDR-L2, CDR-L3 within SEQ ID NO: 1028; 66) the heavy chain variable region comprises the CDR-H1, CDR-H2, CDR-H3 within SEQ ID NO: 955 and the light chain variable region comprises the CDR-L1, CDR-L2, CDR-L3 within SEQ ID NO: 1029; 67) the heavy chain variable region comprises the CDR-H1, CDR-H2, CDR-H3 within SEQ ID NO: 956 and the light chain variable region comprises the CDR-L1, CDR-L2, CDR-L3 within SEQ ID NO: 1030; 68) the heavy chain variable region comprises the CDR-H1, CDR-H2, CDR-H3 within SEQ ID NO: 957 and the light chain variable region comprises the CDR-L1, CDR-L2, CDR-L3 within SEQ ID NO: 1031; 69) the heavy chain variable region comprises the CDR-H1, CDR-H2, CDR-H3 within SEQ ID NO: 958 and the light chain variable region comprises the CDR-L1, CDR-L2, CDR-L3 within SEQ ID NO: 1032; 70) the heavy chain variable region comprises the CDR-H1, CDR-H2, CDR-H3 within SEQ ID NO: 959 and the light chain variable region comprises the CDR-L1, CDR-L2, CDR-L3 within SEQ ID NO: 1033; 71) the heavy chain variable region comprises the CDR-H1, CDR-H2, CDR-H3 within SEQ ID NO: 960 and the light chain variable region comprises the CDR-L1, CDR-L2, CDR-L3 within SEQ ID NO: 1034; 72) the heavy chain variable region comprises the CDR-H1, CDR-H2, CDR-H3 within SEQ ID NO: 961 and the light chain variable region comprises the CDR-L1, CDR-L2, CDR-L3 within SEQ ID NO: 1035; 73) the heavy chain variable region comprises the CDR-H1, CDR-H2, CDR-H3 within SEQ ID NO: 962 and the light chain variable region comprises the CDR-L1, CDR-L2, CDR-L3 within SEQ ID NO: 1036; and/or 74) the heavy chain variable region comprises the CDR-H1, CDR-H2, CDR-H3 within SEQ ID NO: 963 and the light chain variable region comprises the CDR-L1, CDR-L2, CDR-L3 within SEQ ID NO: 1037.

[0041] In several embodiments, 1) the heavy chain variable region comprises SEQ ID NO: 890 and the light chain variable region comprises SEQ ID NO: 964; 2) the heavy chain variable region comprises SEQ ID NO: 891 and the light chain variable region comprises SEQ ID NO: 965; 3) the heavy chain variable region comprises SEQ ID NO: 892 and the light chain variable region comprises SEQ ID NO: 966; 4) the heavy chain variable region comprises SEQ ID NO: 893 and the light chain variable region comprises SEQ ID NO: 967; 5) the heavy chain variable region comprises SEQ ID NO: 894 and the light chain variable region comprises SEQ ID NO: 968; 6) the heavy chain variable region comprises SEQ ID NO: 895 and the light chain variable region comprises SEQ ID NO: 969; 7) the heavy chain variable region comprises SEQ ID NO: 896 and the light chain variable region comprises SEQ ID NO: 970; 8) the heavy chain variable region comprises SEQ ID NO: 897 and the light chain variable region comprises SEQ ID NO: 971; 9) the heavy chain variable region comprises SEQ ID NO: 898 and the light chain variable region comprises SEQ ID NO: 972; 10) the heavy chain variable region comprises SEQ ID NO: 899 and the light chain variable region comprises SEQ ID NO: 973; 11) the heavy chain variable region comprises SEQ ID NO: 900 and the light chain variable region comprises SEQ ID NO: 974; 12) the heavy chain variable region comprises SEQ ID NO: 901 and the light chain variable region comprises SEQ ID NO: 975; 13) the heavy chain variable region comprises SEQ ID NO: 902 and the light chain variable region comprises SEQ ID NO: 976; 14) the heavy chain variable region comprises SEQ ID NO: 903 and the light chain variable region comprises SEQ ID NO: 977; 15) the heavy chain variable region comprises SEQ ID NO: 904 and the light chain variable region comprises SEQ ID NO: 978; 16) the heavy chain variable region comprises SEQ ID NO: 905 and the light chain variable region comprises SEQ ID NO: 979; 17) the heavy chain variable region comprises SEQ ID NO: 906 and the light chain variable region comprises SEQ ID NO: 980; 18) the heavy chain variable region comprises SEQ ID NO: 907 and the light chain variable region comprises SEQ ID NO: 981; 19) the heavy chain variable region comprises SEQ ID NO: 908 and the light chain variable region comprises SEQ ID NO: 982; 20) the heavy chain variable region comprises SEQ ID NO: 909 and the light chain variable region comprises SEQ ID NO: 983; 21) the heavy chain variable region comprises SEQ ID NO: 910 and the light chain variable region comprises SEQ ID NO: 984; 22) the heavy chain variable region comprises SEQ ID NO: 911 and the light chain variable region comprises SEQ ID NO: 985; 23) the heavy chain variable region comprises SEQ ID NO: 912 and the light chain variable region comprises SEQ ID NO: 986; 24) the heavy chain variable region comprises SEQ ID NO: 913 and the light chain variable region comprises SEQ ID NO: 987; 25) the heavy chain variable region comprises SEQ ID NO: 914 and the light chain variable region comprises SEQ ID NO: 988; 26) the heavy chain variable region comprises SEQ ID NO: 915 and the light chain variable region comprises SEQ ID NO: 989; 27) the heavy chain variable region comprises SEQ ID NO: 916 and the light chain variable region comprises SEQ ID NO: 990; 28) the heavy chain variable region comprises SEQ ID NO: 917 and the light chain variable region comprises SEQ ID NO: 991; 29) the heavy chain variable region comprises SEQ ID NO: 918 and the light chain variable region comprises SEQ ID NO: 992; 30) the heavy chain variable region comprises SEQ ID NO: 919 and the light chain variable region comprises SEQ ID NO: 993; 31) the heavy chain variable region comprises SEQ ID NO: 920 and the light chain variable region comprises SEQ ID NO: 994; 32) the heavy chain variable region comprises SEQ ID NO: 921 and the light chain variable region comprises SEQ ID NO: 995; 33) the heavy chain variable region comprises SEQ ID NO: 922 and the light chain variable region comprises SEQ ID NO: 996; 34) the heavy chain variable region comprises SEQ ID NO: 923 and the light chain variable region comprises SEQ ID NO: 997; 35) the heavy chain variable region comprises SEQ ID NO: 924 and the light chain variable region comprises SEQ ID NO: 998; 36) the heavy chain variable region comprises SEQ ID NO: 925 and the light chain variable region comprises SEQ ID NO: 999; 37) the heavy chain variable region comprises SEQ ID NO: 926 and the light chain variable region comprises SEQ ID NO: 1000; 38) the heavy chain variable region comprises SEQ ID NO: 927 and the light chain variable region comprises SEQ ID NO: 1001; 39) the heavy chain variable region comprises SEQ ID NO: 928 and the light chain variable region comprises SEQ ID NO: 1002; 40) the heavy chain variable region comprises SEQ ID NO: 929 and the light chain variable region comprises SEQ ID NO: 1003; 41) the heavy chain variable region comprises SEQ ID NO: 930 and the light chain variable region comprises SEQ ID NO: 1004; 42) the heavy chain variable region comprises SEQ ID NO: 931 and the light chain variable region comprises SEQ ID NO: 1005; 43) the heavy chain variable region comprises SEQ ID NO: 932 and the light chain variable region comprises SEQ ID NO: 1006; 44) the heavy chain variable region comprises SEQ ID NO: 933 and the light chain variable region comprises SEQ ID NO: 1007; 45) the heavy chain variable region comprises SEQ ID NO: 934 and the light chain variable region comprises SEQ ID NO: 1008; 46) the heavy chain variable region comprises SEQ ID NO: 935 and the light chain variable region comprises SEQ ID NO: 1009; 47) the heavy chain variable region comprises SEQ ID NO: 936 and the light chain variable region comprises SEQ ID NO: 1010; 48) the heavy chain variable region comprises SEQ ID NO: 937 and the light chain variable region comprises SEQ ID NO: 1011; 49) the heavy chain variable region comprises SEQ ID NO: 938 and the light chain variable region comprises SEQ ID NO: 1012; 50) the heavy chain variable region comprises SEQ ID NO: 939 and the light chain variable region comprises SEQ ID NO: 1013; 51) the heavy chain variable region comprises SEQ ID NO: 940 and the light chain variable region comprises SEQ ID NO: 1014; 52) the heavy chain variable region comprises SEQ ID NO: 941 and the light chain variable region comprises SEQ ID NO: 1015; 53) the heavy chain variable region comprises SEQ ID NO: 942 and the light chain variable region comprises SEQ ID NO: 1016; 54) the heavy chain variable region comprises SEQ ID NO: 943 and the light chain variable region comprises SEQ ID NO: 1017; 55) the heavy chain variable region comprises SEQ ID NO: 944 and the light chain variable region comprises SEQ ID NO: 1018; 56) the heavy chain variable region comprises SEQ ID NO: 945 and the light chain variable region comprises SEQ ID NO: 1019; 57) the heavy chain variable region comprises SEQ ID NO: 946 and the light chain variable region comprises SEQ ID NO: 1020; 58) the heavy chain variable region comprises SEQ ID NO: 947 and the light chain variable region comprises SEQ ID NO: 1021; 59) the heavy chain variable region comprises SEQ ID NO: 948 and the light chain variable region comprises SEQ ID NO: 1022; 60) the heavy chain variable region comprises SEQ ID NO: 949 and the light chain variable region comprises SEQ ID NO: 1023; 61) the heavy chain variable region comprises SEQ ID NO: 950 and the light chain variable region comprises SEQ ID NO: 1024; 62) the heavy chain variable region comprises SEQ ID NO: 951 and the light chain variable region comprises SEQ ID NO: 1025; 63) the heavy chain variable region comprises SEQ ID NO: 952 and the light chain variable region comprises SEQ ID NO: 1026; 64) the heavy chain variable region comprises SEQ ID NO: 953 and the light chain variable region comprises SEQ ID NO: 1027; 65) the heavy chain variable region comprises SEQ ID NO: 954 and the light chain variable region comprises SEQ ID NO: 1028; 66) the heavy chain variable region comprises SEQ ID NO: 955 and the light chain variable region comprises SEQ ID NO: 1029; 67) the heavy chain variable region comprises SEQ ID NO: 956 and the light chain variable region comprises SEQ ID NO: 1030; 68) the heavy chain variable region comprises SEQ ID NO: 957 and the light chain variable region comprises SEQ ID NO: 1031; 69) the heavy chain variable region comprises SEQ ID NO: 958 and the light chain variable region comprises SEQ ID NO: 1032; 70) the heavy chain variable region comprises SEQ ID NO: 959 and the light chain variable region comprises SEQ ID NO: 1033; 71) the heavy chain variable region comprises SEQ ID NO: 960 and the light chain variable region comprises SEQ ID NO: 1034; 72) the heavy chain variable region comprises SEQ ID NO: 961 and the light chain variable region comprises SEQ ID NO: 1035; 73) the heavy chain variable region comprises SEQ ID NO: 962 and the light chain variable region comprises SEQ ID NO: 1036; and/or 74) the heavy chain variable region comprises SEQ ID NO: 963 and the light chain variable region comprises SEQ ID NO: 1037.

[0042] In several embodiments, the heavy chain variable region further comprises a FW-H1, FW-H2, FW-H3, and FW-H4, and the light chain variable region further comprises a FW-L1, FW-L2, FW-L3, and FW-L4, and wherein: the FW-H1 comprises a sequence having at least 90%, 95%, 99%, or 100% sequence identity to a sequence selected from SEQ ID NOs: 399-402; the FW-H2 comprises a sequence having at least 90%, 95%, 99%, or 100% sequence identity to a sequence selected from SEQ ID NOs: 403-406; the FW-H3 comprises a sequence having at least 90%, 95%, 99%, or 100% sequence identity to a sequence selected from SEQ ID NOs: 407-422; the FW-H4 comprises a sequence having at least 90%, 95%, 99%, or 100% sequence identity to a sequence selected from SEQ ID NOs: 423-427; the FW-L1 comprises a sequence having at least 90%, 95%, 99%, or 100% sequence identity to a sequence selected from SEQ ID NOs: 650-653; the FW-L2 comprises a sequence having at least 90%, 95%, 99%, or 100% sequence identity to a sequence selected from SEQ ID NOs: 654-657; the FW-L3 comprises a sequence having at least 90%, 95%, 99%, or 100% sequence identity to a sequence selected from SEQ ID NOs: 658-661; and/or the FW-L4 comprises a sequence having at least 90%, 95%, 99%, or 100% sequence identity to a sequence selected from SEQ ID NOs: 662-667. In several embodiments, the heavy chain variable domain is encoded by a nucleic acid sequence having at least 90%, 95%, 99%, or 100% sequence identity to any sequence selected from SEQ ID NOs: 1038-1111. In several embodiments, the light chain variable domain is encoded by a nucleic acid sequence having at least 90%, 95%, 99%, or 100% sequence identity to any sequence selected from SEQ ID NOs: 1112-1185. In several embodiments, the anti-CD70 binding domain is an antibody, Fab′ fragment, F(ab′)2 fragment, or scFv. In several embodiments, one or more of the anti-CD70 binding domains as disclosed above is incorporated into a CAR. In several embodiments, such a CAR further comprises an OX40 subdomain and a CD3zeta subdomain (or any signaling/co-stimulatory domain disclosed herein). In several embodiments, the CAR consists of or consists essentially of a CD70 binding domain as disclosed herein, a transmembrane domain/hinge, an OX40 domain and a CD3zeta domain. In several embodiments, the OX40 subdomain comprises an amino sequence having at least 90%, 95%, 99%, or 100% sequence identity to SEQ ID NO: 6. In several embodiments, the OX40 subdomain is encoded by a sequence having at least 90%, 95%, 99%, or 100% sequence identity to SEQ ID NO: 5. In several embodiments, the CD3zeta subdomain comprises an amino sequence having at least 90%, 95%, 99%, or 100%, sequence identity to SEQ ID NO: 8. In several embodiments, the CD3zeta subdomain is encoded by a sequence having at least 90%, 95%, 99%, or 100% sequence identity to SEQ ID NO: 7. In several embodiments, the CAR comprises at least two anti-CD70 binding domains and the CAR is a multivalent CAR. In several embodiments, the multivalent CAR comprises at least two anti-CD70 binding domains and the CAR is a bivalent CAR. In several embodiments, the bivalent CAR comprises a first anti-CD70 binding domain and a second anti-CD70 binding domain, wherein the first anti-CD70 binding domain and second anti-CD70 binding domain each comprise: a) a heavy chain variable region comprising the sequence of SEQ ID NO: 923 and a light chain variable region comprising the sequence of SEQ ID NO: 997; b) a heavy chain variable region comprising the sequence of SEQ ID NO: 949 and a light chain variable region comprising the sequence of SEQ ID NO: 1023; c) a heavy chain variable region comprising the sequence of SEQ ID NO: 950 and a light chain variable region comprising the sequence of SEQ ID NO: 1024; d) a heavy chain variable region comprising the sequence of SEQ ID NO: 952 and a light chain variable region comprising the sequence of SEQ ID NO: 1026; and/or e) a heavy chain variable region comprising the sequence of SEQ ID NO: 953 and a light chain variable region comprising the sequence of SEQ ID NO: 1027. In several embodiments, there is provided a cell comprising an anti-CD70 binding domain and/or a CAR as disclosed above. In several embodiments, another CAR is engineered into the cell. In several embodiments, that CAR does not target NKG2D ligands. In several embodiments, that CAR does not target CD19. In several embodiments, the cell is an immune cell. In several embodiments, the cell is an NK cell. In several embodiments, the cell is used in combination with another cell type (such as, for example, an engineered T cell). In several embodiments, immune cell is not a T cell, a gamma T cell or a delta gamma T cell. In several embodiments, the cell is genetically edited to express a reduced level of CISH, an adenosine receptor, A2A adenosine receptor, A2B adenosine receptor, A3 adenosine receptor, A1 adenosine receptor, A2AR, TGFBR, B2M, CIITA, NKG2A, CBLB, TRIM29, SOCS2, SMAD3, MAPKAPK3, CEACAM1, or DDIT4, or any combination thereof, as compared to a non-engineered cell. In several embodiments, the cell is genetically edited with one or more guide RNAs having at least 90% or at least 95% sequence identity to SEQ ID NOs: 1190-1201. In several embodiments, the NK cells are genetically edited to express a reduced level of SMAD3, MAPKAPK3, CEACAM1, or DDIT4, or any combination thereof, as compared to a non-engineered NK cell. In several embodiments, the NK cells are genetically edited with one or more guide RNAs having at least 90% or at least 95% sequence identity to SEQ ID NOs: 1190-1201. In several embodiments, selected genes may not be disrupted in the engineered cells. For example, in one embodiment, the immune cells have not undergone disruption of a T Cell Receptor Alpha Constant (TRAC) gene. In one embodiment, the immune cells have not undergone disruption of a B2M gene. In one embodiment, the immune cells have not undergone disruption of MHC Class I.

[0043] In several embodiments, there is provided a method of treating cancer in a subject comprising administering to the subject one or more anti-CD70 binding domain as described above (or elsewhere herein). In several embodiments, there is provided a use of the anti-CD70 binding domain as described above (or elsewhere herein) for the treatment of cancer and/or in the manufacture of a medicament for the treatment of cancer.

[0044] In several embodiments, the NK cells disclosed herein are engineered to express interleukin 15 (IL15, IL-15). In some embodiments, the IL15 is a membrane-bound IL15 (mbIL15). In some embodiments, the mbIL15 comprises a native IL15 sequence and at least one transmembrane domain. In some embodiments, the native IL15 sequence is a human native IL15 sequence. In some embodiments, the native IL15 sequence is encoded by a sequence having at least 85%, at least 90%, at least 95% sequence identity to SEQ ID NO: 11. In some embodiments, the native IL15 sequence comprises a peptide sequence having at least 85%, at least 90%, at least 95% sequence identity to SEQ ID NO: 12. In several embodiments, the mbIL15 is encoded by a sequence having at least 85%, at least 90%, at least 95% sequence identity to SEQ ID NO: 1188. In some embodiments, the mbIL15 comprises a peptide sequence having at least 85%, at least 90%, at least 95% sequence identity to SEQ ID NO: 1189. In some embodiments, the mbIL15 is optionally bicistronically encoded on the polynucleotide encoding the CAR. In several embodiments, the CAR is encoded by a polynucleotide having at least 85%, at least 90%, or at least 95% sequence identity to one or more of the polynucleotides of SEQ ID NO: 138-220 or a portion thereof (e.g. a portion excluding the mbIL15 sequence and/or self-cleaving peptide sequence), and/or comprises an amino acid sequence having at least 85%, at least 90%, or at least 95% sequence identity to one or more of the amino acid sequences of SEQ ID NO: 313-395, or a portion thereof (e.g. a portion excluding the mbIL15 sequence and/or self-cleaving peptide sequence).

[0045] In several embodiments, expression of CIS is substantially reduced as compared to a non-engineered NK cell. In several embodiments, the NK cells do not express a detectable level of CIS protein.

[0046] In several embodiments, the NK cells are further genetically engineered to express a reduced level of a transforming growth factor beta receptor (TGFBR) as compared to a non-engineered NK cell, to express a reduced level of beta-2 microglobulin (B2M) as compared to a non-engineered NK cell, to express a reduced level of CIITA (class II major histocompatibility complex transactivator) as compared to a non-engineered NK cell, to express a reduced level of a Natural Killer Group 2, member A (NKG2A) receptor as compared to a non-engineered NK cell, to express a reduced level of a Cbl proto-oncogene B protein encoded by a CBLB gene as compared to a non-engineered NK cell, to express a reduced level of a tripartite motif-containing protein 29 protein encoded by a TRIM29 gene as compared to a non-engineered NK cell, to express a reduced level of a suppressor of cytokine signaling 2 protein encoded by a SOCS2 gene as compared to a non-engineered NK cell, to express a reduced level of a mothers against decapentaplegic homolog 3 (SMAD3) protein encoded by a SMAD3 gene as compared to a non-engineered NK cell, to express a reduced level of a MAP kinase-activated protein kinase 3 (MAPKAPK3) protein encoded by a MAPKAPK3 gene as compared to a non-engineered NK cell, to express a reduced level of a carcinoembryonic antigen-related cell adhesion molecule 1 (CEACAM1) protein encoded by a CEACAM1 gene as compared to a non-engineered NK cell, to express a reduced level of a DNA-damage-inducible transcript 4 (DDIT4) protein encoded by a DDIT4 gene as compared to a non-engineered NK cell, to express CD47, and/or to express HLA-E, or any combination thereof. In several embodiments, the NK cells are further genetically edited to disrupt expression of at least one immune checkpoint protein by the NK cells. In several embodiments, the at least one immune checkpoint protein is selected from CTLA4, PD-1, lymphocyte activation gene (LAG-3), NKG2A receptor, KIR2DL-1, KIR2DL-2, KIR2DL-3, KIR2DS-1 and/or KIR2DA-2, and combinations thereof.

[0047] According to several embodiments, the gene editing to reduce expression or the gene editing to induce expression is made using a CRISPR-Cas system. In several embodiments, the CRISPR-Cas system comprises a Cas selected from Cas9, Csn2, Cas4, Cpf1, C2c1, C2c3, Cas13a, Cas13b, Cas13c, CasX, CasY, and combinations thereof. In several embodiments, the Cas is Cas9.

[0048] According to several embodiments, the CRISPR-Cas system comprises a Cas selected from Cas3, Cas8a, Cas5, Cas8b, Cas8c, Cas10d, Cse1, Cse2, Csy1, Csy2, Csy3, GSU0054, Cas10, Csm2, Cmr5, Cas10, Csx11, Csx10, Csf1, and combinations thereof. In several embodiments, the one or more guide RNA having at least 95% sequence identity to SEQ ID NO: 121, SEQ ID NO: 122, or SEQ ID NO: 123 is used to edit the CD70 gene. In several embodiments, the one or more guide RNA having at least 85%, 90%, or 95% sequence identity to SEQ ID NO: 130, SEQ ID NO: 131, SEQ ID NO: 132, SEQ ID NO: 133, or SEQ ID NO: 134 is used to edit the CISH gene. In several embodiments, one or more guide RNA having at least 85%, 90%, or 95% sequence identity to SEQ ID NO: 130, SEQ ID NO: 131, SEQ ID NO: 132, SEQ ID NO: 133, or SEQ ID NO: 134 is used to edit the TGFBR2 gene.

[0049] In several embodiments, the gene editing to reduce expression or the gene editing to induce expression is made using a zinc finger nuclease (ZFN). In several embodiments, the gene editing to reduce expression or the gene editing to induce expression is made using a Transcription activator-like effector nuclease (TALEN).

[0050] Depending on the method, the cancer to be treated is renal cell carcinoma, or a metastasis from renal cell carcinoma.

[0051] In several embodiments, the methods disclosed herein further comprising optionally administering a plurality of engineered T cells, wherein the T cells are engineered to express a CAR. In several embodiments, the CAR expressed by the T cells is directed to CD70.

[0052] In several embodiments, there is provided a polynucleotide encoding an anti-CD70 chimeric antigen receptor, wherein the CAR comprises an anti-CD70 binding domain, wherein the anti-CD70 binding domain is encoded by a polynucleotide comprising a sequence having at least 95% sequence identity to one or more of SEQ ID NOs: 38-120, 221-229, 1038-1111, 1112-1185, and/or comprises an amino acid sequence having at least 95% sequence identity to one or more of the amino acid sequences of SEQ ID NO: 230-312, 890-963, 964-1037. In several embodiments, the CAR comprises an OX40 subdomain encoded by a sequence having at least 85%, 90%, or 95% sequence identity to SEQ ID NO: 5. In several embodiments, the OX40 subdomain comprises an amino acid sequence having at least 85%, at least 90%, or at least 95% sequence identity to SEQ ID NO: 6. In several embodiments, the CAR comprises a CD3zeta domain encoded by a sequence having at least 85%, 90%, or 95% sequence identity to SEQ ID NO: 7. In several embodiments, the CD3zeta subdomain comprises an amino acid sequence having at least 85%, at least 90%, or at least 95% sequence identity to SEQ ID NO: 8. In several embodiments, there is further provided a polynucleotide encoding mbIL15, wherein the mbIL15 is encoded by a sequence having at least 85%, 90%, or 95% sequence identity to SEQ ID NO: 1188. In several embodiments, the mbIL15 comprises an amino acid sequence having at least 85%, at least 90%, or at least 95% sequence identity to SEQ ID NO: 1189. In several embodiments, the one or more of SEQ ID NOs: 38-120, 221-229, 1038-1111, 1112-1185, the polynucleotide encoding OX40, the polynucleotide encoding CD3zeta, and the polynucleotide encoding mbIL15 are arranged in a 5′ to 3′ orientation within the polynucleotide.

[0053] Also provided for herein is a method of enhancing the persistence of a population of immune cells to be used in cancer immunotherapy, comprising identifying a target marker on a tumor to be treated, determining if a population of immune cells to be engineered to express a CAR that binds the target marker also endogenously expresses the target marker; editing the genome of the population of immune cells to disrupt the gene encoding the endogenous target marker, and engineering the population of immune cells to express the CAR, wherein the disruption of the endogenous expression of the target marker by the immune cells reduces the ability of the CAR to bind the endogenous target marker on the immune cells, thereby enhancing the persistence of the population of immune cells.

[0054] In several embodiments, the immune cells are NK cells, T cells, or a combination thereof. In several embodiments, the target marker is CD70. In several embodiments, the gene editing is made using a CRISPR-Cas system and the Cas is optionally guided to the endogenous gene by one or more of SEQ ID NOs: 121-123. In several embodiments, a CRISPR-Cas system to disrupt expression of a cytokine-inducible SH2-containing (CIS) protein encoded by a CISH gene. In several embodiments, the Cas is guided to the endogenous gene by one or more of SEQ ID NOs: 130-134. In several embodiments, an adenosine receptor, such as the A2AR is edited. In several embodiments, a CRISPR-Cas system is used to edit a gene encoding an adenosine receptor. In several embodiments, the Cas is guided to the endogenous gene by one or more of SEQ ID NOs: 396-398. In several embodiments, SMAD3 is edited. In several embodiments, a CRISPR-Cas system is used to edit a gene encoding SMAD3. In several embodiments, the Cas is guided to the endogenous gene by one or more of SEQ ID NOs: 1190-1192. In several embodiments, MAPKAPK3 is edited. In several embodiments, a CRISPR-Cas system is used to edit a gene encoding MAPKAPK3. In several embodiments, the Cas is guided to the endogenous gene by one or more of SEQ ID NOs: 1193-1195. In several embodiments, CEACAM1 is edited. In several embodiments, a CRISPR-Cas system is used to edit a gene encoding CEACAM1. In several embodiments, the Cas is guided to the endogenous gene by one or more of SEQ ID NOs: 1196-1198. In several embodiments, DDIT4 is edited. In several embodiments, a CRISPR-Cas system is used to edit a gene encoding DDIT4. In several embodiments, the Cas is guided to the endogenous gene by one or more of SEQ ID NOs: 1199-1201. In several embodiments, combinations of one or more of the above genes are edited (optionally in combination with other genes to be edited as disclosed elsewhere herein).

[0055] Provided for herein, in several embodiments, is an anti-CD70 chimeric antigen receptor (CAR), wherein the CAR comprises an anti-CD70 binding domain, an OX40 domain, and a CD3zeta domain, wherein the anti-CD70 CAR is encoded by a polynucleotide having at least 80%, 85%, 90%, or 95% sequence identity to one or more of SEQ ID NOS: 138-220, wherein SEQ ID NOS: 138-220 also bicistronically encode mbIL15.

[0056] Provided for herein, in several embodiments, is an anti-CD70 chimeric antigen receptor (CAR), wherein the CAR comprises an anti-CD70 binding domain, an OX40 domain, and a CD3zeta domain, wherein the anti-CD70 CAR comprises an amino acid sequence having at least 80%, 85%, 90%, or 95% sequence identity to one or more of the amino acid sequences of SEQ ID NO: 313-395, or a portion thereof (e.g. a portion excluding the mbIL15 sequence and/or self-cleaving peptide sequence).

[0057] Some embodiments relate to a method comprising administering an immune cell as described herein to a subject in need. In some embodiments, the subject has cancer. In some embodiments, the administration treats, inhibits, or prevents progression of the cancer.

[0058] Several embodiments provide for uses of the cells, anti-CD70 scFvs, anti-CD70 CARs, and/or the polynucleotides or amino acid sequences disclosed herein in the treatment or prevention of cancer. Several embodiments provide for uses of the cells, anti-CD70 scFvs, anti-CD70 CARs, and/or the polynucleotides or amino acid sequences disclosed herein in the manufacture of a medicament for treatment or prevention of cancer.

### BRIEF DESCRIPTION OF THE DRAWINGS

[0059] FIG. 1 depicts non-limiting schematics of tumor-directed chimeric antigen receptors.

[0060] FIG. 2 depicts additional non-limiting schematics of tumor-directed chimeric antigen receptors.

[0061] FIG. 3 depicts additional non-limiting schematics of tumor-directed chimeric antigen receptors.

[0062] FIG. 4 depicts additional non-limiting schematics of tumor-directed chimeric antigen receptors.

[0063] FIG. 5 depicts additional non-limiting schematics of tumor-directed chimeric antigen receptors.

[0064] FIG. 6 depicts non-limiting schematics of tumor-directed chimeric antigen receptors directed against non-limiting examples of tumor markers.

[0065] FIG. 7 depicts additional non-limiting schematics of tumor-directed chimeric antigen receptors directed against non-limiting examples of tumor markers.

[0066] FIGS. 8A-8C show flow cytometry data related to the degree of expression of CD70 by natural killer cells.

[0067] FIG. 9 depicts a non-limiting schematic process flow for generation of engineered NK cells for use therapeutic methods for cancer therapy according to several embodiments disclosed herein.

[0068] FIGS. 10A-10B show schematics for non-limiting examples of protocols for CRISPR-based modification and culture of engineered NK cells according to several embodiments disclosed herein.

[0069] FIGS. 11A-11D show flow cytometry data related to CRISPR-mediated knockdown of CD70. FIG. 11A shows data for CD70 expression on NK cells from a first donor after CRISPR-mediated knockdown using three different guide RNAs. FIG. 11B shows corresponding control data for the first donor. FIG. 11C shows data for CD70 expression on NK cells from a second donor after CRISPR-mediated knockdown using three different guide RNAs. FIG. 11D shows corresponding control data for the first donor. These experiments were performed using the KD7 protocol.

[0070] FIGS. 12A-12E show flow cytometry data related to CRISPR-mediated knockdown of CD70 expression on NK cells from an additional donor. FIG. 12A shows expression of CD70 using guide RNA 1. FIG. 12B shows expression of CD70 using guide RNA 2. FIG. 12C shows expression of CD70 using guide RNA 3. FIG. 12D shows expression of CD70 by non-electroporated NK cells. FIG. 12E shows unstained NK cells. These experiments were performed using the KD7 protocol.

[0071] FIGS. 13A-13D show flow cytometry data related to CRISPR-mediated knockdown of CD70 expression on NK cells from the same donor as in FIG. 12 but using combinations of guide RNA. FIG. 13A shows expression of CD70 using guide RNA 1+2. FIG. 13B shows expression of CD70 using guide RNA 1+3. FIG. 13C shows expression of CD70 using guide RNA 2+3. FIGS. 13D and 13E are the same controls as shown in FIGS. 12D and 12E. These experiments were performed using the KD7 protocol.

[0072] FIGS. 14A-14F show flow cytometry data related to CD70 expression 14 days after CRISPR-mediated CD70 knockout (21 days total). FIG. 14A shows expression of CD70 using guide RNA 1. FIG. 14B shows expression of CD70 using guide RNA 2. FIG. 14C shows expression of CD70 using guide RNA 3. FIG. 14D shows expression of CD70 by non-electroporated NK cells. FIG. 14E shows unstained NK cells. These experiments were performed using the KD7 protocol, with the cells being cultured from Day 11 to Day 21 in low IL-2 media. FIG. 14F shows an additional non-limiting gene editing process.

[0073] FIGS. 15A-15D show flow cytometry data related to CD70 expression 14 days after CRISPR-mediated CD70 knockout (21 days total), with the NK cells from the same donor as in FIGS. 12-14, but using combinations of guide RNA. FIG. 15A shows expression of CD70 using guide RNA 1+2. FIG. 15B shows expression of CD70 using guide RNA 1+3. FIG. 15C shows expression of CD70 using guide RNA 2+3. FIGS. 15D and 15E are the same controls as shown in FIGS. 14D and 14E. These experiments were performed using the KD7 protocol, with the cells being cultured from Day 11 to Day 21 in low IL-2 media.

[0074] FIGS. 16A-16C show flow cytometry data related to knockdown of CD70 expression in two different donors. For these experiments, CRISPR-mediated CD70 knockout was performed prior to NK cell expansion, using the KD0 protocol, with the data shown from Day 5 post-electroporation. FIG. 16A shows data from a first donor with each of three guide RNAs used singly. FIG. 16B shows CD70 expression using the same individual guide RNAs, but with NK cells from a different donor. FIG. 16C shows control data (donor 2).

[0075] FIGS. 17A-17C show flow cytometry data related to knockdown of CD70 expression in the same two donors as FIG. 16, with expression evaluated after 8 days (day 13 of the KD0 protocol). FIG. 17A shows data from a first donor with each of three guide RNAs used singly. FIG. 17B shows CD70 expression using the same individual guide RNAs, but with NK cells from a different donor. FIG. 17C shows control data (donor 2).

[0076] FIGS. 18A-18D show data related to the cytotoxicity to CD70 knockout NK cells (CD70-KO-NK) from two donors. FIG. 18A shows CD70-KO-NK cell (generated using individual guide RNA 1, 2, or 3 on NK cells from a first donor) cytotoxicity against REH cells, which do not express CD27, which is the ligand for CD70, at the indicated effector:target ratios. FIG. 18B shows the cytotoxicity of CD70-KO-NK cells from donor 1 against Jurkat cells, which do express CD27. FIG. 18C shows CD70-KO-NK cell (NK cells from a second donor) cytotoxicity against REH cells. FIG. 18D shows the cytotoxicity of CD70-KO-NK cells from donor 2 against Jurkat cells. Cytotoxicity was assessed at Day 14.

[0077] FIGS. 19A-19B relate to a schematic timeline for a protocol to genetically engineer and expand NK cells and data related to NK cell expansion.

[0078] FIGS. 20A-20C show flow cytometry data after CRISPR gene editing of NK cells. FIG. 20A shows CD70 expression by NK cells using three different guide RNAs. FIG. 20B shows CD70 expression by NK cells from a second donor and edited using the same guide RNAs. FIG. 20C shows related control data.

[0079] FIGS. 21A-21B show flow cytometry data after CRISPR gene editing of Jurkat cells. FIG. 21A shows CD70 expression by Jurkat cells from a first donor after editing with three different combinations of guide RNA. FIG. 21B shows control data.

[0080] FIGS. 22A-22D show flow cytometry data after CRISPR gene editing of Jurkat cells. FIG. 22A shows a sample protocol. FIG. 22B shows CD70 expression by the Jurkat cells after CRISPR editing using three different guide RNA sets, with the cells being kept in culture after the gene editing. FIG. 22C shows CD70 expression by the Jurkat cells after CRISPR editing using the same guide RNA sets, but with the cells being frozen after the gene editing and then thawed for flow analysis. FIG. 23D shows control data.

[0081] FIG. 23 shows a schematic for a non-limiting embodiment of a gene editing construct for CRISPR modification (knock-in) of the endogenous CD70 locus in NK cells to insert a CD70-directed CAR construct into the endogenous locus.

[0082] FIGS. 24A-24F relate to data assessing the engineered expression of CD70 on Jurkat cells and on Jurkat cells subjected to CRISPR gene editing. The left panel of each of the figures is a negative control, and the central panel a control using only the secondary antibody. FIG. 24A shows data related to CD70 and GFP expression on native Jurkat cells. The right panel of FIG. 24A indicates that native Jurkat cells express relatively low levels of CD70. FIG. 24B shows expression of CD70 in Jurkat cells engineered to express the marker at elevated (e.g., for purposes of tonic signaling and CD70 CAR screening). As seen in the right panel of FIG. 24B CD70 expression is significantly increased on these Jurkat cells (˜85% of the cells are positive for human CD70 and GFP (used as a marker for transduced cells). FIG. 24C shows the reduction of Jurkat native CD70 expression through the use of a first guide RNA and CRISPR gene editing. FIG. 24D shows that the engineered constitutive expression of CD70 on Jurkat cells is maintained even in the face of CRISPR gene editing to reduce CD70. FIG. 24E and FIG. 24F show similar data regarding the maintenance of expression of CD70 on the engineered Jurkat cells.

[0083] FIG. 25 shows a table summarizing CD70 expression data (MFI) for the various conditions shown in FIG. 24A-24F. The data indicate that the engineered CD70-expressing Jurkat cells exhibit near constitutive expression of CD70, even higher than a known high-expressing cell line, the 786-O cells.

[0084] FIGS. 26A-26C relate to expression of anti-CD70 CAR constructs on Jurkat cells. As non-limiting examples of anti-CD70 CAR, Jurkat cells were transduced with NK71 or NK72 constructs (schematically depicted in FIG. 6). The left panels in FIGS. 26A-26C is a negative control, the central panel is the control for the secondary antibody and the right panel shows data related to signal detected with an anti-Flag antibody. FIG. 26A shows control data related to detecting Flag expression on Jurkat cells. The Flag tag is used in some embodiments to detect expression of a CAR construct. In several embodiments, the Flag tag is not included. FIG. 26B shows expression of the NK71 anti-CD70 CAR construct and FIG. 26C shows expression of the NK72 anti-CD70 CAR construct by Jurkat cells.

[0085] FIGS. 27A-27F show data related to the ability of anti-CD70 CAR-expressing Jurkat cells to bind human bind CD70. FIG. 27A shows data from native Jurkat cells. Moving left to right are negative control, control for the antibody to human Fc, binding when 2 ug/ml of a CD70-hFc complex is incubated with the Jurkat cells and binding is detected with the human Fc-APC antibody, and binding when 10 ug/ml of a CD70-hFc complex is incubated with the Jurkat cells and binding is detected with the human Fc-APC antibody. FIG. 27B shows data from native Jurkat cells. Moving left to right is a control for the antibody to murine Fc, binding when 2 ug/ml of a CD70-murine Fc complex is incubated with the Jurkat cells and binding is detected with a murine Fc-APC antibody, and binding when 10 ug/ml of a CD70-murine Fc complex is incubated with the Jurkat cells and binding is detected with the murine Fc-APC antibody, and detection of Flag tag (present in the NK71/72 CAR constructs, but not native Jurkat cells). FIG. 27C shows data from NK71-expressing Jurkat cells. Moving left to right are negative control, control for the antibody to human Fc, binding when 2 ug/ml of a CD70-hFc complex is incubated with the Jurkat cells and binding is detected with the human Fc-APC antibody, and binding when 10 ug/ml of a CD70-hFc complex is incubated with the Jurkat cells and binding is detected with the human Fc-APC antibody. FIG. 27D shows data from NK71-expressing Jurkat cells. Moving left to right is a control for the antibody to murine Fc, binding when 2 ug/ml of a CD70-murine Fc complex is incubated with the Jurkat cells and binding is detected with a murine Fc-APC antibody, and binding when 10 ug/ml of a CD70-murine Fc complex is incubated with the Jurkat cells and binding is detected with the murine Fc-APC antibody, and detection of Flag tag (present in the NK71/72 CAR constructs, but not native Jurkat cells). FIG. 27E shows data from NK72-expressing Jurkat cells. Moving left to right are negative control, control for the antibody to human Fc, binding when 2 ug/ml of a CD70-hFc complex is incubated with the Jurkat cells and binding is detected with the human Fc-APC antibody, and binding when 10 ug/ml of a CD70-hFc complex is incubated with the Jurkat cells and binding is detected with the human Fc-APC antibody. FIG. 27F shows data from NK72-expressing Jurkat cells. Moving left to right is a control for the antibody to murine Fc, binding when 2 ug/ml of a CD70-murine Fc complex is incubated with the Jurkat cells and binding is detected with a murine Fc-APC antibody, and binding when 10 ug/ml of a CD70-murine Fc complex is incubated with the Jurkat cells and binding is detected with the murine Fc-APC antibody, and detection of Flag tag (present in the NK71/72 CAR constructs, but not native Jurkat cells).

[0086] FIGS. 28A-28E shows data related to CRISPR-mediated gene editing of two targets in NK cells. FIG. 28A shows a non-limiting example of an electroporation protocol. In these Figures, expression of NKG2A (in conjunction with CD70) and TGFBR2 (in conjunction with CD70) were assessed. Knockout of CD70 expression is discussed in further detail below. FIG. 28B shows expression of NKG2A after NK cells were exposed to CRISPR/guide RNAs targeting NKG2A. FIG. 28C shows control data. FIG. 28D shows expression of TGFBR2 after NK cells were exposed to CRISPR/guide RNAs targeting TGFBR2. FIG. 28E shows control data.

[0087] FIGS. 29A-29J shows data related to CRISPR-mediated gene editing of two targets in NK cells and subsequent expression of a CAR construct at 4 days post-transduction with the CAR-encoding vector (11 days post-electroporation). FIG. 29A shows expression of expression of a non-limiting embodiment of a CAR targeting CD70 after NK cells were exposed to CD70 gRNAs. FIG. 29B shows knockdown of expression of CD70 on NK cells through editing targeting by CD70 gRNAs. FIG. 29C shows anti-CD70 CAR expression on the NK cells after NK cells were exposed to CD70 and CISH gRNAs. FIG. 29D shows knockdown of expression of CD70 on NK cells through editing targeting by CD70 gRNAs and CISH gRNAs. FIG. 29E shows anti-CD70 CAR expression on the NK cells after NK cells were exposed to CD70 and NKG2A gRNAs. FIG. 29F shows knockdown of expression of CD70 on NK cells through editing targeting by CD70 gRNAs and NKG2A gRNAs. FIG. 29G shows anti-CD70 CAR expression on the NK cells after NK cells were exposed to CD70 and TGFBR2 gRNAs. FIG. 29H shows knockdown of expression of CD70 on NK cells through editing targeting by CD70 gRNAs and TGFBR2 gRNAs. FIG. 29I shows mock control data for anti-CD70 expression on NK cells. FIG. 29J shows mock control data for CD70 expression on NK cells.

[0088] FIGS. 30A-30J shows data related to CRISPR-mediated gene editing of two targets in NK cells and subsequent expression of a CAR construct at 11 days post-transduction with the CAR-encoding vector (18 days post-electroporation). FIG. 30A shows expression of a non-limiting embodiment of a CAR targeting CD70 after NK cells were exposed to CD70 gRNAs. FIG. 30B shows knockdown of expression of CD70 on NK cells through editing targeting by CD70 gRNAs. FIG. 30C shows anti-CD70 CAR expression on the NK cells after NK cells were exposed to CD70 and CISH gRNAs. FIG. 30D shows knockdown of expression of CD70 on NK cells through editing targeting by CD70 gRNAs and CISH gRNAs. FIG. 30E shows anti-CD70 CAR expression on the NK cells after NK cells were exposed to CD70 and NKG2A gRNAs. FIG. 30F shows knockdown of expression of CD70 on NK cells through editing targeting by CD70 gRNAs and NKG2A gRNAs. FIG. 30G shows anti-CD70 CAR expression on the NK cells after NK cells were exposed to CD70 and TGFBR2 gRNAs. FIG. 30H shows knockdown of expression of CD70 on NK cells through editing targeting by CD70 gRNAs and TGFBR2 gRNAs. FIG. 30I shows mock control data for anti-CD70 expression on NK cells. FIG. 30J shows mock control data for CD70 expression on NK cells.

[0089] FIGS. 31A-31C show summary expression data for a first non-limiting embodiment of an anti-CD70 CAR on NK cells subject to gene-editing knockdown of one or more targets, evaluated at 11 days post-transduction. FIG. 31A shows the expression levels of a first non-limiting anti-CD70 CAR (NK71) on NK cells treated with CD70 gRNA, CD70 and CISH gRNAs, CD70 and NKG2A gRNAs, CD70 and TGFBR2 gRNAs, or with GFP. Data are the percentage of NK cells positive for the FLAG tag in the NK71 CAR construct (several embodiments do not employ a FLAG tag). FIG. 31B shows the underlying raw mean fluorescence intensity (MFI) data. FIG. 31C shows data related to the degree of CD70 knockout in the NK cells with the indicated gRNAs.

[0090] FIGS. 32A-32C show summary expression data for a second non-limiting embodiment of an anti-CD70 CAR on NK cells subject to gene-editing knockdown of one or more targets, evaluated at 11 days post-transduction. FIG. 32A shows the expression levels of a first non-limiting anti-CD70 CAR (NK72) on NK cells treated with CD70 gRNA, CD70 and CISH gRNAs, CD70 and NKG2A gRNAs, CD70 and TGFBR2 gRNAs, or with GFP. Data are the percentage of NK cells positive for the FLAG tag in the NK72 CAR construct (several embodiments do not employ a FLAG tag). FIG. 32B shows the underlying raw mean fluorescence intensity (MFI) data. FIG. 32C shows data related to the degree of CD70 knockout in the NK cells with the indicated gRNAs.

[0091] FIGS. 33A-33B show data related to the changes in NK cell proliferation based on knockout of different targets in the NK cells and engineering the NK cells to express an anti-CD70 CAR. FIG. 33A shows data that knockdown of CD70 expression and engineered expression of an anti-CD70 CAR (this experiment used the non-limiting NK71 construct) and knockdown of CISH expression results in enhanced NK cell proliferation (as compared to knockdown of CD70 alone. Similar data are shown when CD70 and TGFRB2 are knockout. In contrast, knockdown of NKG2A results in decreased proliferation (as compared to CD70 knockout alone). FIG. 33B shows corresponding data for proliferation when the NK cells are subjected to the same gene editing procedures, but transduced with a construct encoding the non-limiting example anti-CD70 CAR, NK72.

[0092] FIGS. 34A-34B show data related to NK cell survival based on knockout of different targets in the NK cells and engineering the NK cells to express an anti-CD70 CAR. FIG. 34A shows survival data for NK cells engineered to express the non-limiting NK71 anti-CD70 CAR out to 35 days (post-electroporation). As shown, the double knockout of CD70 and TGFBR2 result in modestly improved survival throughout the experimental time-course (as compared to the CD70 knockout). The dual CD70 and CISH knockout resulted in significantly enhanced survival with approximately a 2-fold increase in survival (as compared to CD70 alone). The knockout of NKG2A resulted in a reduction in survival, with the NK population slowly declining from Day 21 to Day 35. The reduced survival of this group makes the survival of the CD70-CISH dual knockout nearly 3 times that of the NKG2A group. FIG. 34B shows similar trends among the groups for the non-limiting NK72 anti-CD70 CAR. These data also suggest that, according to some embodiments, the NK71 construct results in enhanced survival as compared to the NK72 construct.

[0093] FIGS. 35A-35D show data related to cytotoxicity of NK cells expressing an anti-CD70 CAR and subjected to knockout of various NK cell modulating targets. FIG. 35A shows the cytotoxic effects of engineered NK cells expressing the non-limiting NK71 anti-CD70 CAR against 786-O cells, which express high levels of CD70, at an E:T ratio of 1:1. FIG. 35B shows the cytotoxic effects of engineered NK cells expressing the non-limiting NK71 anti-CD70 CAR against 786-O cells at an E:T ratio of 1:2. FIG. 35C shows the cytotoxic effects of engineered NK cells expressing the non-limiting NK72 anti-CD70 CAR against 786-O cells at an E:T ratio of 1:1. FIG. 35B shows the cytotoxic effects of engineered NK cells expressing the non-limiting NK72 anti-CD70 CAR against 786-O cells at an E:T ratio of 1:2. Data were collected at 7-days post-transduction.

[0094] FIGS. 36A-36D show data related to cytotoxicity of NK cells expressing an anti-CD70 CAR and subjected to knockout of various NK cell modulating targets. FIG. 36A shows the cytotoxic effects of engineered NK cells expressing the non-limiting NK71 anti-CD70 CAR against ACHN cells, which express low levels of CD70, at an E:T ratio of 1:1. FIG. 36B shows the cytotoxic effects of engineered NK cells expressing the non-limiting NK71 anti-CD70 CAR against ACHN cells at an E:T ratio of 1:2. FIG. 36C shows the cytotoxic effects of engineered NK cells expressing the non-limiting NK72 anti-CD70 CAR against ACHN cells at an ET ratio of 1:1. FIG. 36D shows the cytotoxic effects of engineered NK cells expressing the non-limiting NK72 anti-CD70 CAR against ACHN cells at an ET ratio of 1:2. Data were collected at 7-days post-transduction.

[0095] FIGS. 37A-37B show data related to cytotoxicity of NK cells expressing an anti-CD70 CAR and subjected to knockout of various NK cell modulating targets. FIG. 37A shows the cytotoxic effects of engineered NK cells expressing the non-limiting NK71 anti-CD70 CAR against 786-O cells, which express high levels of CD70, at an E:T ratio of 1:2. FIG. 37B shows the cytotoxic effects of engineered NK cells expressing the non-limiting NK71 anti-CD70 CAR against 786-O cells at an E:T ratio of 1:4. Data were collected at 14-days post-transduction.

[0096] FIGS. 38A-38B show data related to cytotoxicity of NK cells expressing an anti-CD70 CAR and subjected to knockout of various NK cell modulating targets. FIG. 38A shows the cytotoxic effects of engineered NK cells expressing the non-limiting NK71 anti-CD70 CAR against ACHN cells, which express low levels of CD70, at an E:T ratio of 1:1. FIG. 38B shows the cytotoxic effects of engineered NK cells expressing the non-limiting NK71 anti-CD70 CAR against ACHN cells at an E:T ratio of 1:2. Data were collected at 14-days post-transduction.

[0097] FIGS. 39A-39B show data related to cytotoxicity of NK cells expressing an anti-CD70 CAR and subjected to knockout of various NK cell modulating targets. FIG. 39A shows the cytotoxic effects of engineered NK cells expressing the non-limiting NK72 anti-CD70 CAR against 786-O cells, which express high levels of CD70, at an E:T ratio of 1:2. FIG. 39B shows the cytotoxic effects of engineered NK cells expressing the non-limiting NK72 anti-CD70 CAR against 786-O cells at an ET ratio of 1:4. Data were collected at 14-days post-transduction.

[0098] FIGS. 40A-40B show data related to cytotoxicity of NK cells expressing an anti-CD70 CAR and subjected to knockout of various NK cell modulating targets. FIG. 40A shows the cytotoxic effects of engineered NK cells expressing the non-limiting NK72 anti-CD70 CAR against ACHN cells, which express low levels of CD70, at an E:T ratio of 1:1. FIG. 40B shows the cytotoxic effects of engineered NK cells expressing the non-limiting NK71 anti-CD70 CAR against ACHN cells at an E:T ratio of 1:2. Data were collected at 14-days post-transduction.

[0099] FIGS. 41A-41O relate to gene editing protocol and evaluation of the expression of the various editing targets as well as expression of an anti-CD70 CAR. FIG. 41A shows a non-limiting embodiment of the gene editing protocol employed. FIG. 41B shows an unstained control (no anti-CD70 antibody) representing background signal. FIG. 41B shows a control where CD70 expression was measured on NK cells transduced with a CAR not targeting CD70 and that does not include a CD70 subunit. This represents baseline NK cell CD70 expression. FIG. 41D shows CD70 expression on NK cells subjected to gene editing to knockout CD70 expression. FIG. 41E shows expression of the non-limiting NK71 anti-CD70 CAR on NK cells with knocked out CD70 expression. FIG. 41F shows CD70 expression on NK cells subjected to gene editing to knockout CD70 expression. FIG. 41G shows expression of the non-limiting NK72 anti-CD70 CAR on NK cells with knocked out CD70 expression. FIG. 41H shows CD70 expression on NK cells subjected to gene editing to knockout CD70 and CISH expression. FIG. 41F shows expression of the non-limiting NK71 anti-CD70 CAR on NK cells with knocked out CD70 and CISH expression. FIG. 41J shows CD70 expression on NK cells subjected to gene editing to knockout CD70 and CISH expression. FIG. 41GK shows expression of the non-limiting NK72 anti-CD70 CAR on NK cells with knocked out CD70 and CISH expression. FIG. 41L shows CD70 expression on NK cells subjected to electroporation only, as a control. FIG. 41M shows expression of the non-limiting NK71 anti-CD70 CAR on NK cells subjected to electroporation only, as a control. FIG. 41N shows CD70 expression on NK cells subjected to electroporation only, as a control. FIG. 41O shows expression of the non-limiting NK72 anti-CD70 CAR on NK cells subjected to electroporation only, as a control.

[0100] FIGS. 42A-42C relate to cytotoxicity data for NK cells subjected to gene editing and engineered to express an anti-CD70 CAR. FIG. 42A shows cytotoxicity of the NK cells treated in the indicated manner against 786-O cells, which express high levels of CD70, evaluated at 7 days post-transduction and at an E:T ratio of 1:2. FIG. 42B shows cytotoxicity of the NK cells treated in the indicated manner against ACHN cells, which express low levels of CD70, evaluated at 7 days post-transduction and at an E:T ratio of 1:2. FIG. 42C shows cytotoxicity of the NK cells treated in the indicated manner against 786-O cells, which express high levels of CD70, evaluated at 7 days post-transduction and at an E:T ratio of 1:2.

[0101] FIGS. 43A-43I relate to CD70 expression on NK cells (7 days post-electroporation) using various guide RNAs. FIG. 43A shows CD70 expression levels by NK cells subjected to gene editing to knockout expression of CD70 using gRNA 1. FIG. 43B shows CD70 expression levels by NK cells subjected to gene editing to knockout expression of CD70 using gRNA 2. FIG. 43C shows CD70 expression levels by NK cells subjected to gene editing to knockout expression of CD70 using gRNA 3. FIG. 43D shows CD70 expression levels by NK cells subjected to gene editing to knockout expression of CD70 using gRNAs 1 and 3. FIG. 43E shows CD70 expression levels by NK cells subjected to gene editing to knockout expression of CD70 using gRNAs 1 and 2. FIG. 43F shows CD70 expression levels by NK cells subjected to gene editing to knockout expression of CD70 using gRNAs 2 and 3. FIG. 43G shows CD70 expression levels by NK cells subjected to gene editing to knockout expression of CD70 using gRNA 1 (for CD70) and guide RNA to knockout CISH. FIG. 43H shows CD70 expression levels by NK cells subjected to gene editing to knockout expression of CD70 using gRNA 1 (for CD70) and guide RNA to knockout the adenosine receptor (A2AR). FIG. 43I shows control data from NK cells subject to electroporation alone (no gene editing enzymes or guide RNA).

[0102] FIGS. 44A-44D relate to cytotoxicity evaluation of NK cells subjected to various gene editing protocols and engineered to express an anti-CD70 CAR (used here as a non-limiting embodiment is NK71, an anti-CD70 CAR). FIG. 44A shows cytotoxicity of the indicated NK cells against Reh tumor cells, at either a 1:1 or 1:2 effector:target ratio. FIG. 44B shows a summary histogram of the cytotoxicity at 1:1. FIG. 44C shows a summary histogram of the cytotoxicity at 1:2. FIG. 44D shows cytotoxicity of the indicated constructs against Nalm-6 tumor cells.

[0103] FIGS. 45A-45B show cytotoxicity evaluation of NK cells subjected to various gene editing protocols and engineered to express an anti-CD70 CAR (used here as a non-limiting embodiment is NK71, an anti-CD70 CAR). FIG. 45A shows cytotoxicity of the indicated NK cells against Reh tumor cells at a 1:1 E:T ratio. FIG. 45B shows cytotoxicity of the indicated NK cells against Reh tumor cells at a 1:2 E:T ratio.

[0104] FIGS. 46A-46J show data related to the expression of an anti-CD70 CAR in NK cells subjected to gene editing to knockout native CD70 expression (and/or CISH or adenosine receptor expression) as well as expression of native CD70 by the NK cells. FIG. 46A shows data for antiCD70 CAR expression and native CD70 expression levels by NK cells subjected to gene editing using gRNA 1 (for CD70). FIG. 46B shows data for antiCD70 CAR expression and native CD70 expression levels by NK cells subjected to gene editing using gRNA 2 (for CD70). FIG. 46C shows data for antiCD70 CAR expression and native CD70 expression levels by NK cells subjected to gene editing using gRNA 3 (for CD70). FIG. 46D shows data for antiCD70 CAR expression and native CD70 expression levels by NK cells subjected to gene editing using gRNAs 1 and 3 (both for CD70). FIG. 46E shows data for antiCD70 CAR expression and native CD70 expression levels by NK cells subjected to gene editing using gRNAs 2 and 3 (both for CD70). FIG. 46F shows data for antiCD70 CAR expression and native CD70 expression levels by NK cells subjected to gene editing using gRNAs 1 and 2 (both for CD70). FIG. 46G shows data for antiCD70 CAR expression and native CD70 expression levels by NK cells subjected to gene editing using gRNA 1 (for CD70) and additional gRNA to knockout CISH. FIG. 46H shows data for antiCD70 CAR expression and native CD70 expression levels by NK cells subjected to gene editing using gRNA 1 (for CD70) and additional gRNA to knockout expression of the adenosine receptor (A2AR). FIG. 46I shows control data where NK cells were subjected to electroporation only, but no gRNA or engineered CAR expression. FIG. 46J shows control data with un-transduced NK cells.

[0105] FIGS. 47A-47F show cytotoxicity data related to anti-CD70 CAR-expressing, and gene edited, NK cells against tumor cells. FIG. 47A shows cytotoxicity data of the indicated NK cells against 786-O cells at a 1:2 E:T ratio. FIG. 47B shows cytotoxicity data of the indicated NK cells against 786-O cells at a 1:4 E:T ratio. FIG. 47C shows cytotoxicity data of the indicated NK cells against 786-O cells at a 1:8 E:T ratio. FIG. 47D shows cytotoxicity data of the indicated NK cells against ACHN cells at a 1:2 E:T ratio. FIG. 47E shows cytotoxicity data of the indicated NK cells against ACHN cells at a 1:4 E:T ratio. FIG. 47F shows cytotoxicity data of the indicated NK cells against ACHN cells at a 1:8 E:T ratio.

[0106] FIGS. 48A-48D show cytotoxicity data from various gene edited NK cells that also are engineered to express an anti-CD70 CAR against tumor cells. FIG. 48A shows cytotoxicity data from the indicated gene edited NK cells expressing an anti-CD70 CAR against 786-O cells at a 1:1 ratio, with data collected at 72 hours after co-culturing with the tumor cells. FIG. 48B shows summary data of GFP detection, a surrogate for live tumor cell number, measured as a percent of baseline GFP detection (as of time zero). FIG. 48C shows cytotoxicity data from the indicated gene edited NK cells expressing an anti-CD70 CAR against 786-O cells at a 1:2 ratio, with data collected at 72 hours after co-culturing with the tumor cells. FIG. 48D shows summary data of GFP detection, a surrogate for live tumor cell number, measured as a percent of baseline GFP detection (as of time zero).

[0107] FIGS. 49A-49D show schematics and knockout data from additional various gene edited NK cells that are also engineered to express an anti-CD70 CAR against tumor cells. FIG. 49A shows the schematic where NK cells are first gene edited (e.g. with CRISPR) to knock out both CD70 and a target gene, expanded, and transduced with the NK71 anti-CD70 CAR construct (which is a non-limiting example of a CAR according to the present disclosure), which are then assayed for tumor killing efficacy. FIG. 49B shows consistent percent CD70 expression on day 7 following CD70 and target gene double knockout for different target gene conditions. FIG. 49C shows essentially undetectable CD70 expression on day 10 following double CD70 and target gene double knockout and consistent expression of the non-limiting NK71 CAR in different target gene conditions. FIG. 49D shows PCR amplification data of target gene loci for knockout NK cell populations and indel frequency of amplicons.

[0108] FIGS. 49E-49G show cytotoxicity data for NK cells gene edited for SMAD3. FIG. 49E shows successful knockout of SMAD3 in an NK cell population. FIG. 49F shows cytotoxicity data from SMAD3 or CISH gene edited NK cells expressing the NK71 CAR, against 786-O cells at a 1:4 ratio, with or without treatment with 20 ng/ml TGFb, for up to 6.5 days. FIG. 49G shows the percentage of remaining 786-O cells relative to starting amount after 3 days following treatment with SMAD3 or CISH gene edited NK cells expressing a non-limiting example of a CAR, NK71, at a 1:1 ratio, with or without treatment with 20 ng/mL TGFb.

[0109] FIGS. 49H-49I show cytotoxicity data for NK cells gene edited for A2AR. FIG. 49H shows cytotoxicity data from A2AR or CISH gene edited NK cells expressing the NK71 CAR against 786-O cells at a 1:4 ratio, with or without treatment with 10 μM NECA, for up to 6 days. FIG. 49I shows the percentage of remaining 786-O cells relative to starting amount after 3 days following treatment with A2AR or CISH gene edited NK cells expressing the NK71 CAR at a 1:1 ratio, with or without treatment with 10 μM NECA.

[0110] FIGS. 49J-49K show cytotoxicity data for NK cells gene edited for MAPKAPK3. FIG. 49J shows cytotoxicity data from MAPKAPK3 (MK3) or CISH gene edited NK cells expressing the NK71 CAR against 786-O cells at a 1:2 ratio, for up to 94 hours. FIG. 49K shows the percentage of remaining 786-O cells relative to starting amount after 3 days following treatment with MK3 or CISH gene edited NK cells expressing the NK71 CAR at a 1:1 ratio.

[0111] FIGS. 49L-49P show cytotoxicity data for NK cells gene edited for NKG2A. FIG. 49L shows cytotoxicity data from NKG2A or CISH gene edited NK cells expressing the NK71 CAR against 786-O cells at a 1:1 ratio, for up to 72 hours. FIG. 49M shows cytotoxicity data from NKG2A, MK3, or CISH gene edited NK cells expressing the NK71 CAR against 786-O cells at a 1:1 ratio, for up to 94 hours. FIG. 49N shows cytotoxicity data from NKG2A, MK3, or CISH gene edited NK cells expressing the NK71 CAR against 786-O cells at a 1:2 ratio, for up to 94 hours. FIG. 49O shows cytotoxicity data from NKG2A or CISH gene edited NK cells expressing the NK71 CAR against 786-O cells at a 1:1 ratio, with or without treatment with 20 ng/ml TGFb, for up to 72 hours. FIG. 49P shows cytotoxicity data from NKG2A or CISH gene edited NK cells expressing the NK71 CAR against 786-O cells at a 1:2 ratio, with or without treatment with 10 μM NECA, for up to 54 hours.

[0112] FIGS. 49Q-49R show cytotoxicity data for NK cells gene edited for DDIT4. FIG. 49Q shows cytotoxicity data from DDIT4 or CISH gene edited NK cells expressing the NK71 CAR against 786-O cells at a 1:1 ratio, with or without treatment with 50 μM CoCl₂, for up to 94 hours. FIG. 49R shows the percentage of remaining 786-O cells relative to starting amount after 3 days following treatment with DDIT4 or CISH gene edited NK cells expressing the NK71 CAR at a 1:1 ratio, with or without treatment with 50 μM CoCl₂.

[0113] FIGS. 49S-49T show cytotoxicity data for NK cells gene edited for CEACAM1. FIG. 49S shows cytotoxicity data from CEACAM1 or CISH gene edited NK cells expressing the NK71 CAR against 786-O cells at a 1:2 ratio, with or without treatment with 1 μg/mL CEACAM5, for up to 72 hours. FIG. 49T shows the percentage of remaining 786-O cells relative to starting amount after 3 days following treatment with CEACAM1 or CISH gene edited NK cells expressing the NK71 CAR at a 1:2 ratio, with or without treatment with 1 μg/mL CEACAM5.

[0114] FIGS. 49U and 49V show survival over 49 days for NK cells expressing the NK71 CAR that have been gene edited for CD70 and the various indicated gene targets.

[0115] FIG. 50A depicts exemplary heavy chain variable region (VH) and light chain variable region (VL) peptide and nucleic acid sequences for the selected anti-CD70 scFvs disclosed herein. The sequences disclosed herein may be used for any of the embodiments disclosed herein.

[0116] FIG. 50B depicts exemplary heavy chain variable region and light chain variable region complementarity determining regions (CDRs) for the selected anti-CD70 scFvs disclosed herein. In some embodiments, other combinations of CDRs may be used to prepare other anti-CD70 scFvs or other binding domains. The CDRS disclosed herein may be used for any of the embodiments disclosed herein.

[0117] FIG. 50C depicts a schematic for selecting CARs comprising an anti-CD70 binding domain based on tonic signaling and immune cell activation.

[0118] FIG. 50D shows data related detection of the degree of tonic signaling in Jurkat lines.

[0119] FIG. 50E shows CAR activation relative to tonic signaling further ordered by overall CAR expression in Jurkat cells expressing the disclosed anti-CD70 CARs. The circled points depict selected non-limiting embodiments of anti-CD70 CAR constructs that result in significant on-target activation relative to tonic signaling.

[0120] FIG. 50F shows a non-limiting list of 10 anti-CD70 CAR constructs that were selected for having desirable activation and limited/minimal tonic signaling effects in Jurkat cells. These constructs were tested in additional assays disclosed herein.

[0121] FIGS. 51A-51B shows expression levels of tested anti-CD70 CARs in a donor NK cell population gene edited to knockout CD70. FIG. 51A shows flow cytometry plots detecting expression of the CAR (by anti-FLAG antibody conjugated with allophycocyanin (APC)) and loss of expression of CD70 (by anti-CD70 antibody conjugated with phycoerythrin (PE)). FIG. 51B shows the quantification of anti-CD70 CAR and CD70 expression in the NK cell population of FIG. 51A. NK8 refers to a control construct that expresses GFP instead of a CAR/mbIL15.

[0122] FIGS. 52A-52D shows expression levels of tested anti-CD70 CARs in another donor NK cell population edited to knockout CD70 and preliminary cytotoxicity assays. FIG. 52A shows flow cytometry plots detecting expression of the CAR (by anti-FLAG antibody conjugated with APC) and loss of expression of CD70 (by anti-CD70 antibody conjugated with PE). FIG. 52B shows the quantification of anti-CD70 CAR and CD70 expression in the NK cell populations of FIG. 52A. FIG. 52C show the raw mean fluorescence intensity (MFI) used to quantify CAR expression. FIG. 52D shows a cytotoxicity assay for anti-CD70 CAR NK cell populations against 786-O tumor cells at different effector:target (E:T) ratios and the calculated EC₅₀ from the assay.

[0123] FIGS. 53A-53F shows cytotoxicity data of tested anti-CD70 CARs in CD70 knockout NK cells. FIG. 53A shows cytotoxicity data of tested NK cells against 786-O cells at a 1:2 ratio, for up to 7 days. FIG. 53B shows remaining 786-O cells at 73.5 hours following the NK cell 1:2 co-culture as measured by 786-O GFP fluorescence. FIG. 53C shows cytotoxicity data of the tested NK cells of FIG. 53A, but extended to 10 days. Culture was re-challenged with additional tumor cells at day 7. FIG. 53D shows cytotoxicity data of tested NK cells against 786-O cells at a 1:4 ratio, for up to 7 days. FIG. 53E shows remaining 786-O cells at 73.5 hours following the NK cell 1:4 co-culture as measured by 786-O GFP fluorescence. FIG. 53F shows cytotoxicity data of tested NK cells against 786-O cells at a 1:8 ratio, for up to 7 days.

[0124] FIG. 54A-54D show cytotoxicity data of tested anti-CD70 CARs in CD70 knockout NK cells against either 786-O cells or ACHN cells. FIG. 54A shows cytotoxicity data for tested NK cells against 786-O cells at a 1:2 ratio, for up to 5 days. The 786-O cells express GFP. FIG. 54B shows cytotoxicity data for tested NK cells against ACHN cells at a 1:2 ratio, for up to 5 days. The ACHN cells are stained with NucRed. FIG. 54C shows cytotoxicity data for tested NK cells against 786-O cells at a 1:4 ratio, for up to 5 days. FIG. 54D shows cytotoxicity data for tested NK cells against ACHN cells at a 1:4 ratio, for up to 5 days.

[0125] FIGS. 55A-55M show cytotoxicity data of tested anti-CD70 CARs in CD70 knockout NK cells from one donor. FIG. 55A shows flow cytometry plots detecting expression of the CAR (by APC anti-FLAG) and loss of expression of CD70 (by PE anti-CD70). FIG. 55B show preliminary cytotoxicity data for tested NK cells against 786-O cells at different E:T ratios at 4 hours of co-culture. FIG. 55C shows quantification of the expressed anti-CD70 CAR, loss of CD70 expression, and the calculated EC₅₀ from the assay of FIG. 55B. FIG. 55D shows cytotoxicity data of tested NK cells against 786-O cells at a 1:2 ratio, for up to 64 hours. FIG. 55E shows cytotoxicity data of tested NK cells against 786-O cells at a 1:2 ratio, for up to 6 days. FIG. 55F shows cytotoxicity data of tested NK cells against 786-O cells at a 1:2 ratio, for up to 7 days. FIG. 55G shows cytotoxicity data of tested NK cells as seen in FIG. 55F but extended to 11 days and re-challenged with additional tumor cells at day 7. FIG. 55H shows remaining 786-O cells at 51 hours following the NK cell 1:2 co-culture as measured by 786-O GFP fluorescence. FIG. 55I shows remaining 786-O cells at 66 hours following the NK cell 1:2 co-culture as measured by 786-O GFP fluorescence. FIG. 55J shows cytotoxicity data of tested NK cells against 786-O cells at a 1:4 ratio, for up to 64 hours. FIG. 55K shows cytotoxicity data of tested NK cells against 786-O cells at a 1:4 ratio, for up to 6 days. FIG. 55L shows cytotoxicity data of tested NK cells against 786-O cells at a 1:4 ratio, for up to 7 days. FIG. 55M shows cytotoxicity data of tested NK cells against 786-O cells at a 1:4 ratio, for up to 11 days. Cultures were re-challenged with additional tumor cells at day 7.

[0126] FIGS. 56A-56J show cytotoxicity data of tested anti-CD70 CARs in CD70 knockout NK cells from another donor. FIG. 56A shows flow cytometry plots detecting expression of the CAR (by APC anti-FLAG) and loss of expression of CD70 (by PE anti-CD70). FIG. 56B shows preliminary cytotoxicity data for tested NK cells against 786-O cells at different E:T ratios at 4 hours of co-culture. FIG. 56C shows quantification of the expressed anti-CD70 CAR, loss of CD70 expression, and the calculated EC₅₀ from the assay of FIG. 56B. FIG. 56D shows cytotoxicity data of tested NK cells against 786-O cells at a 1:2 ratio, for up to 5.75 days. FIG. 56E shows cytotoxicity data of tested NK cells as seen in FIG. 56H but extended to 10 days and re-challenge with additional tumor cells at day 6. FIG. 56F shows cytotoxicity data of tested NK cells against 786-O cells at a 1:4 ratio, for up to 42 hours. FIG. 56G shows cytotoxicity data of tested NK cells against 786-O cells at a 1:4 ratio, for up to 5 days. FIG. 56H shows cytotoxicity data of tested NK cells against 768-O cells at a 1:4 ratio, for up to 5.75 days. FIG. 56I shows cytotoxicity data of tested NK cells against 786-O cells at a 1:8 ratio, for up to 42 hours. FIG. 56J shows cytotoxicity data of tested NK cells against 786-O cells at a 1:8 ratio, for up to 5 days.

[0127] FIGS. 57A-57H show cytotoxicity data of tested anti-CD70 CARs in CD70 knockout NK cells from one donor against ACHN cells. FIG. 57A shows cytotoxicity data of tested NK cells against ACHN cells at a 1:2 ratio, for up to 5 days. Cultures were re-challenged with additional tumor cells at around 3.75 days. FIG. 57B shows the cytotoxicity data of FIG. 57A, but where cell count is normalized to day 0. FIG. 57C shows cytotoxicity data of tested NK cells of FIG. 57B over a longer time period following re-challenge. FIG. 57D shows remaining ACHN cells at 51 hours following the NK cell 1:2 co-culture as measured by ACHN fluorescence. FIG. 57E shows remaining ACHN cells at 66 hours following the NK cell 1:2 co-culture as measured by ACHN fluorescence. FIG. 57F shows cytotoxicity data of tested NK cells against ACHN cells at a 1:4 ratio, for up to 5 days. Cultures were re-challenged with additional tumor cells at around 3.75 days. FIG. 57G shows the cytotoxicity data of FIG. 57F, but where cell count is normalized to day 0. FIG. 57H shows cytotoxicity data of tested NK cells of FIG. 57G over a longer time period following re-challenge.

[0128] FIGS. 58A-58H show cytotoxicity data of tested anti-CD70 CARs in CD70 knockout NK cells from another donor against ACHN cells. FIG. 58A shows cytotoxicity data of tested NK cells against ACHN cells at a 1:4 ratio, for up to 5 days. Cultures were re-challenged with additional tumor cells at around 3.75 days. FIG. 58B shows the cytotoxicity data of FIG. 58A, but where cell count is normalized to day 0. FIG. 58C shows cytotoxicity data of tested NK cells of FIG. 58B over a longer time period following re-challenge. FIG. 58D shows remaining ACHN cells at 51 hours following the NK cell 1:4 co-culture as measured by ACHN fluorescence. FIG. 58E shows remaining ACHN cells at 66 hours following the NK cell 1:4 co-culture as measured by ACHN fluorescence. FIG. 58F shows cytotoxicity data of tested NK cells against ACHN cells at a 1:8 ratio, for up to 5 days. Cultures were re-challenged with additional tumor cells at around 3.75 days. FIG. 58G shows the cytotoxicity data of FIG. 58D, but where cell count is normalized to day 0. FIG. 58H shows cytotoxicity data of tested NK cells of FIG. 58G over a longer time period following re-challenge.

[0129] FIGS. 59A-59D shows expression level and preliminary cytotoxicity data for additional anti-CD70 CARs in NK cells gene edited to knockout CD70 in one donor. FIG. 59A shows flow cytometry plots detecting expression of the CAR (by APC anti-FLAG) and loss of expression of CD70 (by PE anti-CD70). FIG. 59B shows the quantification of anti-CD70 CAR and CD70 expression in the NK cell populations of FIG. 59A. FIG. 59C shows the MFI used to quantify CAR expression. FIG. 59D shows a cytotoxicity assay for anti-CD70 CAR NK cell populations against 786-O tumor cells at different effector:target ratios and the calculated EC₅₀ from the assay.

[0130] FIGS. 60A-60O shows cytotoxicity data of tested anti-CD70 CARs in CD70 knockout NK cells from a donor against either 786-O or ACHN tumor cells. FIG. 60A shows cytotoxicity data of tested NK cells against 786-O cells at a 1:2 ratio, for up to 51 hours. FIG. 60B shows cytotoxicity data of tested NK cells of FIG. 60A, extended to 90 hours and re-challenged with additional tumor cells at 70 hours. FIG. 60C shows remaining 786-O cells at 51 hours following the NK cell 1:2 co-culture as measured by 786-O fluorescence. FIG. 60D shows remaining 786-O cells at 66 hours following the NK cell 1:2 co-culture as measured by 786-O fluorescence. FIG. 60E shows cytotoxicity data of tested NK cells against ACHN cells at a 1:2 ratio, for up to 51 hours. FIG. 60F shows cytotoxicity data of tested NK cells of FIG. 60E extended to 90 hours and re-challenged with additional tumor cells at 70 hours. FIG. 60G shows remaining ACHN cells at 51 hours following the NK cell 1:2 co-culture as measured by ACHN fluorescence. FIG. 60H shows remaining ACHN cells at 66 hours following the NK cell 1:2 co-culture as measured by ACHN fluorescence. FIG. 60I shows cytotoxicity data of tested NK cells against 786-O cells at a ratio of 1:4, for up to 51 hours. FIG. 60J shows cytotoxicity data of the tested NK cell cultures of FIG. 60I, but extended to 90 hours and re-challenged with additional tumor cells at 70 hours. FIG. 60K shows remaining 786-O cells at 51 hours following the NK cell 1:4 co-culture as measured by 786-O fluorescence. FIG. 60L shows remaining 786-O cells at 66 hours following the NK cell 1:4 co-culture as measured by 786-O fluorescence. FIG. 60M shows cytotoxicity data of tested NK cells against ACHN cells at a 1:4 ratio, for up to 51 hours. FIG. 60N shows cytotoxicity data of the tested NK cell cultures of FIG. 60M, but extended to 90 hours and re-challenged with additional tumor cells at 70 hours. FIG. 60O shows remaining ACHN cells at 51 hours following the NK cell 1:4 co-culture as measured by ACHN fluorescence. FIG. 60P shows remaining ACHN cells at 66 hours following the NK cell 1:4 co-culture as measured by ACHN fluorescence.

[0131] FIGS. 61A-61N shows expression level and cytotoxicity data for additional anti-CD70 CARs in NK cells gene edited to knockout CD70 in another donor. FIG. 61A shows flow cytometry plots showing knockout of CD70 in the donor (denoted donor 512). FIG. 61B shows flow cytometry plots detecting expression of the CAR (by APC anti-FLAG) and loss of expression of CD70 (by PE anti-CD70). FIG. 61C shows the quantification of anti-CD70 CAR and CD70 expression in the NK cell population of FIG. 61B. FIG. 61D shows the raw MFI used to quantify CAR expression of FIG. 61B. FIG. 61E shows the % abundance of the tested anti-CD70 CARs after 1 week of culture. FIG. 61F shows the raw MFI of the tested anti-CD70 CARs after 1 week of culture. FIG. 61G shows the % abundance of the tested anti-CD70 CARs after 2 weeks of culture. FIG. 61H shows the raw MFI of the tested anti-CD70 CARs after 2 weeks of culture. FIG. 61I shows the % abundance of the tested anti-CD70 CARs after 3 weeks of culture. FIG. 61J shows the raw MFI of the tested anti-CD70 CARs after 3 weeks of culture. FIG. 61K shows cytotoxicity data of the tested NK cells against 786-O cells at a 1:2 E:T ratio at 3 days of a 14 day total culture. FIG. 61L shows cytotoxicity data of the tested NK cells against 786-O cells at a 1:4 E:T ratio at 3 days of a 14 day total culture. FIG. 61M shows cytotoxicity data of the tested NK cells against ACHN cells at a 1:2 ratio at 3 days of a 14 day total culture. FIG. 61N shows cytotoxicity data of the tested NK cells against ACHN cells at a 1:4 ratio at 3 days of a 14 day total culture.

[0132] FIGS. 62A-62B show NK cell survival over 5 weeks (week 0 to week 5) after transduction with tested anti-CD70 CARs. FIG. 62A shows survival of NK cells from one donor (denoted donor 451). FIG. 62B shows survival of NK cells from another donor (denoted donor 512).

[0133] FIGS. 63A-63B show cytotoxicity data of tested NK cells gene expressing anti-CD70 CARs and gene edited to knockout CD70 and optionally CISH. FIG. 63A shows cytotoxicity data of tested NK cells against 786-O cells at a 1:8 ratio, for up to 64 hours. FIG. 63B shows cytotoxicity data of tested NK cells against ACHN cells at a 1:8 ratio, for up to 64 hours.

[0134] FIGS. 64A-64J show further data related to screening of various CD70 CAR constructs expressed by NK cells and characterization of CD70 gene knockout. FIG. 64A shows data for the indicated CD70 CAR constructs and their ability, when expressed by NK cells, to bind a trimer of CD70 (native CD70 conformation) as measured week 1 post-transduction with the CAR (which is 1 week past the phenotypic analysis of CD70 expression post-gene editing shown in FIGS. 61A-61B). FIG. 64B shows similar data from another donor. FIGS. 64C and 64D shows summary data from the flow cytometry binding data, expressed as a percentage of the NK cell population that is binding the CD70 trimer, or as the detected mean fluorescence intensity (MFI) for the two respective donors. FIGS. 64E and 64F show graphical summary data for the relative expression of each of the indicated CAR constructs by NK cells, as measured by MFI. FIGS. 64G and 64H show flow cytometry plots depicting knockout of CD70 expression in the NK cells from two donors and FIGS. 641 and 64J show the summary data of the percent of NK cells expressing CD70 as a percentage and by MFI for both donors.

[0135] FIGS. 65A-65J show further data related to screening of various CD70 CAR constructs expressed by NK cells and characterization of CD70 gene knockout, measured at 2 weeks post-transduction of the NK cells with the CARs. FIG. 65A shows data for the indicated CD70 CAR constructs and their ability, when expressed by NK cells, to bind a native CD70 trimer. FIG. 65B shows similar data from another donor. FIGS. 65C and 65D shows summary data from the flow cytometry binding data, expressed as a percentage of the NK cell population that is binding the CD70 trimer, or as the detected mean fluorescence intensity (MFI) for the two respective donors. FIGS. 65E and 65F show graphical summary data for the relative expression of each of the indicated CAR constructs by NK cells, as measured by MFI. FIGS. 65G and 65H show flow cytometry plots depicting the maintained knockout of CD70 expression in the NK cells from each of the two donors. FIGS. 65I and 65J show summary data of the percent of NK cells expressing CD70 as a percentage and by MFI for both donors.

[0136] FIGS. 66A-66I show further data related to screening of various CD70 CAR constructs expressed by NK cells and characterization of CD70 gene knockout, measured at 3 weeks post-transduction of the NK cells with the CARs. FIG. 66A shows data for the indicated CD70 CAR constructs and their ability, when expressed by NK cells, to bind a native CD70 trimer. FIG. 66B shows similar data from another donor. FIG. 66C shows summary data from the flow cytometry binding data, expressed as a percentage of the NK cell population that is binding the CD70 trimer, or as the detected mean fluorescence intensity (MFI) for the two respective donors. FIGS. 66D and 66E show graphical summary data for the relative expression of each of the indicated CAR constructs by NK cells, as measured by MFI. FIGS. 66F and 66G show flow cytometry plots depicting the maintained knockout of CD70 expression in the NK cells from each of the two donors. FIGS. 66H and 66I show summary data of the percent of NK cells expressing CD70 as a percentage and by MFI, as well a percent viability, for both donors.

[0137] FIGS. 67A-67J show further data related to screening of various CD70 CAR constructs expressed by NK cells and characterization of CD70 gene knockout, measured at 4 weeks post-transduction of the NK cells with the CARs. FIG. 67A shows data for the indicated CD70 CAR constructs and their ability, when expressed by NK cells, to bind a native CD70 trimer. FIG. 67B shows similar data from another donor. FIGS. 67C and 67D shows summary data from the flow cytometry binding data, expressed as a percentage of the NK cell population that is binding the CD70 trimer, or as the detected mean fluorescence intensity (MFI) for the two respective donors. FIGS. 67E and 67F show graphical summary data for the relative expression of each of the indicated CAR constructs by NK cells, as measured by MFI. FIGS. 67G and 67H show flow cytometry plots depicting the maintained knockout of CD70 expression in the NK cells from each of the two donors. FIGS. 67I and 67J show summary data of the percent of NK cells expressing CD70 as a percentage and by MFI for both donors.

[0138] FIGS. 68A-68I show further data related to screening of various CD70 CAR constructs expressed by NK cells and characterization of CD70 gene knockout, measured at 5 weeks post-transduction of the NK cells with the CARs. FIG. 68A shows data for the indicated CD70 CAR constructs and their ability, when expressed by NK cells, to bind a native CD70 trimer. FIG. 68B shows similar data from another donor. FIGS. 68C and 65D shows summary data from the flow cytometry binding data, expressed as a percentage of the NK cell population that is binding the CD70 trimer, or as the detected mean fluorescence intensity (MFI) for the two respective donors. FIGS. 68E and 68F show graphical summary data for the relative expression of each of the indicated CAR constructs by NK cells, as measured by MFI. FIGS. 68G and 68H show flow cytometry plots depicting the maintained knockout of CD70 expression in the NK cells from each of the two donors. FIG. 68I shows summary data of the percent of NK cells expressing CD70 as a percentage and by MFI for both donors.

[0139] FIGS. 69A-69H show further data related to screening of various CD70 CAR constructs expressed by NK cells and characterization of CD70 gene knockout, measured at 7 weeks post-transduction of the NK cells with the CARs. FIG. 69A shows data for the indicated CD70 CAR constructs and their ability, when expressed by NK cells, to bind a native CD70 trimer and FIG. 68B shows corresponding data from another donor. FIG. 69C shows summary data from the flow cytometry binding data, expressed as a percentage of the NK cell population that is binding the CD70 trimer, or as the detected mean fluorescence intensity (MFI) for the two respective donors. FIGS. 69D and 69E show graphical summary data for the relative expression of each of the indicated CAR constructs by NK cells, as measured by MFI. FIGS. 69F and 69G show flow cytometry plots depicting the maintained knockout of CD70 expression in the NK cells from each of the two donors. FIG. 69H shows summary data of the percent of NK cells expressing CD70 as a percentage and by MFI for both donors.

[0140] FIGS. 70A-70B show data related to the expression of selected non-limiting anti-CD70 CARs by NK cells over time. FIG. 70A tracks the expression of three non-limiting CARs on NK cells from a first donor and FIG. 70B tracks expression of the same CARs on NK cells from a second donor.

[0141] FIGS. 71A-71T show data related to cytokines released by NK cells from one of two donors that are expressing various CD70 CAR constructs (and edited to knockout CD70) when co-cultured with either ACHN or 786-O tumor cells at various effector:target ratios. FIGS. 71A and 71B show levels of interferon-gamma release when cells from the first donor are co-cultured at a 1:2 E:T ratio with 786-O cells (71A) or ACHN cells (71B), with data being collected at day 14 and day 28 after the inception of process for producing the gene edited and transduced cells (e.g., DO of the non-limiting example process shown in FIG. 49A). FIGS. 71C and 71D show corresponding data from the second donor. FIGS. 71E and 71F shows levels of GMCSF release when cells from the first donor are co-cultured at a 1:2 E:T ratio with 786-O cells (71E) or ACHN cells (71F), with data being collected at day 14 and day 28 after inception of the cell production process. FIGS. 71G and 71H show corresponding data from the second donor. FIGS. 71I and 71J shows levels of TNF-alpha release when cells from the first donor are co-cultured at a 1:2 E:T ratio with 786-O cells (71I) or ACHN cells (71J), with data being collected at day 14 and day 28 after inception of the cell production process. FIGS. 71K and 71L show corresponding data from the second donor. FIGS. 71M and 71N shows levels of perforin release when cells from the first donor are co-cultured at a 1:2 E:T ratio with 786-O cells (71M) or ACHN cells (71N), with data being collected at day 14 and day 28 after inception of the cell production process. FIGS. 71O and 71P show corresponding data from the second donor. FIGS. 71Q and 71R shows levels of Granzyme B release when cells from the first donor are co-cultured at a 1:2 E:T ratio with 786-O cells (71Q) or ACHN cells (71R), with data being collected at day 14 and day 28 after inception of the cell production process. FIGS. 71S and 71T show corresponding data from the second donor.

[0142] FIGS. 72A-72M show data related to the sustained persistence (both CAR expression and cell viability) and cytotoxicity of NK cells expressing CD70 CARs and edited to knockout one or both of CD70 and CISH. FIG. 72A shows expression data for the indicated CARs over an 8 week period post-transduction, as measured by the percentage of the population expressing the CAR. FIG. 72B shows similar data, as measured by MFI. FIG. 72C shows data related to the survival of the NK cells over the 8 week in vitro period. FIG. 72D shows data related to the cytotoxicity of NK cells expressing the indicated CARs against 786-O cells at 1:8 E:T. FIG. 72E is a histogram that depicts the final green object count per well (indicative of remaining tumor cell population) for each of the constructs from FIG. 72D. FIGS. 72F and 72G are histograms showing the tumor cell count at the final time point of co-culture of donor NK cells expressing the indicated CARs and the indicated edits, at an E:T of 1:4, against ACHN cells (72F) or 786-O cells (72G). FIGS. 72H and 721 show corresponding data at a 1:8 E:T ratio. FIGS. 72J and 72K show cytotoxicity curves in a re-challenge experimental setup, where the NK cells expressing the indicated CARs, edited for CD70 knockout and edited (or not) for CISH knockout, are re-challenged, at a 1:4 E:T ratio, with ACHN (72J) or 786-O (72K) cells. FIGS. 72L and 72M show corresponding data using a 1:8 E:T ratio.

[0143] FIGS. 73A-73H show data related to cytotoxicity of selected CAR-expressing NK cells against tumor cells in an in vitro assay prior to and post-rechallenge (assay initiated at 21 days after inception of the cell production process). FIG. 73A shows data regarding 786-O tumor cell presence, using a 1:4 E:T ratio), 72 hours prior to rechallenge. FIG. 73B shows data regarding 786-O tumor cell presence, using a 1:8 E:T ratio), 72 hours prior to rechallenge. FIG. 73C shows data regarding 786-O tumor cell presence, using a 1:4 E:T ratio), 6 days after rechallenge of the NK cells with additional 786-O cells. 73D shows data regarding 786-O tumor cell presence, using a 1:8 E:T ratio), 6 days after rechallenge of the NK cells with additional 786-O cells. FIG. 73E shows data regarding ACHN tumor cell presence, using a 1:4 E:T ratio), 72 hours prior to rechallenge. FIG. 73F shows data regarding ACHN tumor cell presence, using a 1:8 E:T ratio), 72 hours prior to rechallenge. FIG. 73G shows data regarding ACHN tumor cell presence, using a 1:4 E:T ratio), 6 days after rechallenge of the NK cells with additional ACHN cells. 73H shows data regarding ACHN tumor cell presence, using a 1:8 E:T ratio), 6 days after rechallenge of the NK cells with additional ACHN cells.

[0144] FIGS. 74A-74H show data related to cytotoxicity of selected CAR-expressing NK cells against tumor cells in an in vitro assay prior to and post-rechallenge (assay initiated at 28 days after inception of the cell production process). FIG. 74A shows data regarding 786-O tumor cell presence, using a 1:4 E:T ratio), 72 hours prior to rechallenge. FIG. 74B shows data regarding 786-O tumor cell presence, using a 1:8 E:T ratio), 72 hours prior to rechallenge. FIG. 74C shows data regarding 786-O tumor cell presence, using a 1:4 E:T ratio), 6 days after rechallenge of the NK cells with additional 786-O cells. 74D shows data regarding 786-O tumor cell presence, using a 1:8 E:T ratio), 6 days after rechallenge of the NK cells with additional 786-O cells. FIG. 74E shows data regarding ACHN tumor cell presence, using a 1:4 E:T ratio), 72 hours prior to rechallenge. FIG. 74F shows data regarding ACHN tumor cell presence, using a 1:8 E:T ratio), 72 hours prior to rechallenge. FIG. 74G shows data regarding ACHN tumor cell presence, using a 1:4 E:T ratio), 6 days after rechallenge of the NK cells with additional ACHN cells. 74H shows data regarding ACHN tumor cell presence, using a 1:8 E:T ratio), 6 days after rechallenge of the NK cells with additional ACHN cells.

[0145] FIGS. 75A-75F show data related to Indel frequency and assessment of CISH KO. FIG. 75A shows detection of Indel frequency with respect to edits in CISH. FIG. 75B shows detection of Indel frequency with respect to edits in CD70. FIG. 75C shows a schematic of a CISH signaling pathway. FIG. 75D shows western blot data assessing expressing of phosphorylated Stat 5, a signaling molecule downstream of CIS. FIG. 75E shows quantification data normalized to the electroporation control. FIG. 75F shows data normalized to the electroporation control at a value of 1.

### DETAILED DESCRIPTION

[0146] Some embodiments of the methods and compositions provided herein relate to engineered immune cells and combinations of the same for use in immunotherapy. In several embodiments, the engineered cells are engineered in multiple ways, for example, to express a cytotoxicity-inducing receptor complex. As used herein, the term “cytotoxic receptor complexes” shall be given its ordinary meaning and shall also refer to (unless otherwise indicated), Chimeric Antigen Receptors (CAR), chimeric receptors (also called activating chimeric receptors in the case of NKG2D chimeric receptors). In several embodiments, the cells are further engineered to achieve a modification of the reactivity of the cells against non-tumor tissue and/or other therapeutic cells. In several embodiments, natural killer (NK) cells are also engineered to express a cytotoxicity-inducing receptor complex (e.g., a chimeric antigen receptor or chimeric receptor), such as for example targeting CD70 expressing tumor cells. In several embodiments, the NK cells are genetically edited to reduce and/or eliminate certain markers/proteins that would otherwise inhibit or limit the therapeutic efficacy of the CAR-expressing NK cells. In several embodiments, certain markers/proteins have expression that is upregulated or otherwise induced by one or more processes undertaken to engineer and/or expand the NK cells. For example, in several embodiments, the process of expanding NK cells in culture results in substantially increased CD70 expression by the NK cells. In those embodiments wherein a CD70 CAR is engineered to be expressed by expanded NK cells, the CAR would actually target, not only a CD70-expressing tumor, but other engineered and expanded NK cells as well (based on the increased expression of CD70 resulting from culture of the cells). Thus, for example, in several embodiments, therapeutic NK cells are engineered to express a CAR that targets CD70 and are likewise genetically edited to knock out CD70 expression on the NK cells themselves, which, if present, would cause the CAR-expressing NK cells to target the tumor and the therapeutic NK cells as well. This would otherwise create a self-limiting therapeutic effect, which could allow for tumor expansion and progression of the cancer.

[0147] The term “anticancer effect” refers to a biological effect which can be manifested by various means, including but not limited to, a decrease in tumor volume, a decrease in the number of cancer cells, a decrease in the number of metastases, an increase in life expectancy, decrease in cancer cell proliferation, decrease in cancer cell survival, and/or amelioration of various physiological symptoms associated with the cancerous condition.

### Cell Types

[0148] Some embodiments of the methods and compositions provided herein relate to a cell such as an immune cell. For example, an immune cell, such as an NK cell or a T cell, may be engineered to include a chimeric receptor such as a CD70-directed chimeric receptor, or engineered to include a nucleic acid encoding said chimeric receptor as described herein. Additional embodiments relate to engineering a second set of cells to express another cytotoxic receptor complex, such as an NKG2D chimeric receptor complex as disclosed herein. Still additional embodiments relate to the further genetic manipulation of the cells (e.g., donor NK cells) to reduce, disrupt, minimize and/or eliminate the expression of one or more markers/proteins by the NK cells, resulting in an enhancement of the efficacy and/or persistence of the engineered NK cells.

[0149] Traditional anti-cancer therapies relied on a surgical approach, radiation therapy, chemotherapy, or combinations of these methods. As research led to a greater understanding of some of the mechanisms of certain cancers, this knowledge was leveraged to develop targeted cancer therapies. Targeted therapy is a cancer treatment that employs certain drugs that target specific genes or proteins found in cancer cells or cells supporting cancer growth, (like blood vessel cells) to reduce or arrest cancer cell growth. More recently, genetic engineering has enabled approaches to be developed that harness certain aspects of the immune system to fight cancers. In some cases, a patient's own immune cells are modified to specifically eradicate that patient's type of cancer. Various types of immune cells can be used, such as T cells, Natural Killer (NK cells), or combinations thereof, as described in more detail below.

[0150] To facilitate cancer immunotherapies, there are provided for herein polynucleotides, polypeptides, and vectors that encode chimeric antigen receptors (CAR) that comprise a target binding moiety (e.g., an extracellular binder of a ligand, or a tumor marker-directed chimeric receptor, expressed by a cancer cell) and a cytotoxic signaling complex. For example, some embodiments include a polynucleotide, polypeptide, or vector that encodes, for example a chimeric antigen receptor directed against a tumor marker, for example, CD70, CD19, CD123, Her2, mesothelin, Claudin 6, BCMA, EGFR, among others, to facilitate targeting of an immune cell to a cancer and exerting cytotoxic effects on the cancer cell. Also provided are engineered immune cells (e.g., NK cells and/or T cells) expressing such CARs. There are also provided herein, in several embodiments, polynucleotides, polypeptides, and vectors that encode a construct comprising an extracellular domain comprising two or more subdomains, e.g., a first CD70-targeting subdomain comprising an anti-CD70 binding domain as disclosed herein and a second subdomain comprising an additional binding moiety, for example a C-type lectin-like receptor and a cytotoxic signaling complex, or alternatively another anti-CD70 binding domain. Also provided are engineered immune cells (e.g., NK cells and/or T cells) expressing such bi-specific constructs. Methods of treating cancer and other uses of such cells for cancer immunotherapy are also provided for herein.

[0151] To facilitate cancer immunotherapies, there are also provided for herein polynucleotides, polypeptides, and vectors that encode chimeric receptors that comprise a target binding moiety (e.g., an extracellular binder of a ligand expressed by a cancer cell) and a cytotoxic signaling complex. For example, some embodiments include a polynucleotide, polypeptide, or vector that encodes, for example an activating chimeric receptor comprising an NKG2D extracellular domain that is directed against a tumor marker, for example, MICA, MICB, ULBP1, ULBP2, ULBP3, ULBP4, ULBP5, and ULBP6, among others, to facilitate targeting of an immune cell to a cancer and exerting cytotoxic effects on the cancer cell. Also provided are engineered immune cells (e.g., NK cells and/or T cells) expressing such chimeric receptors. There are also provided herein, in several embodiments, polynucleotides, polypeptides, and vectors that encode a construct comprising an extracellular domain comprising two or more subdomains, e.g., first and second ligand binding receptor and a cytotoxic signaling complex. Also provided are engineered immune cells (e.g., NK cells and/or T cells) expressing such bi-specific constructs (in some embodiments the first and second ligand binding domain target the same ligand). Methods of treating cancer and other uses of such cells for cancer immunotherapy are also provided for herein.

### Engineered Cells for Immunotherapy

[0152] In several embodiments, cells of the immune system are engineered to have enhanced cytotoxic effects against target cells, such as tumor cells. For example, a cell of the immune system may be engineered to include a tumor-directed chimeric receptor and/or a tumor-directed CAR as described herein. In several embodiments, white blood cells or leukocytes, are used, since their native function is to defend the body against growth of abnormal cells and infectious disease. There are a variety of types of white bloods cells that serve specific roles in the human immune system, and are therefore a preferred starting point for the engineering of cells disclosed herein. White blood cells include granulocytes and agranulocytes (presence or absence of granules in the cytoplasm, respectively). Granulocytes include basophils, cosinophils, neutrophils, and mast cells. Agranulocytes include lymphocytes and monocytes. Cells such as those that follow or are otherwise described herein may be engineered to include a chimeric antigen receptor, such as a CD70-directed CAR, or a nucleic acid encoding the CAR. In several embodiments, the cells are optionally engineered to co-express a membrane-bound interleukin 15 (mbIL15) domain. As discussed in more detail below, in several embodiments, the therapeutic cells, are further genetically modified enhance the cytotoxicity and/or persistence of the cells. In several embodiments, the genetic modification enhances the ability of the cell to resist signals emanating from the tumor microenvironment that would otherwise cause a reduced efficacy or shortened lifespan of the therapeutic cells.

### Monocytes for Immunotherapy

[0153] Monocytes are a subtype of leukocyte. Monocytes can differentiate into macrophages and myeloid lineage dendritic cells. Monocytes are associated with the adaptive immune system and serve the main functions of phagocytosis, antigen presentation, and cytokine production. Phagocytosis is the process of uptake cellular material, or entire cells, followed by digestion and destruction of the engulfed cellular material. In several embodiments, monocytes are used in connection with one or more additional engineered cells as disclosed herein. Some embodiments of the methods and compositions described herein relate to a monocyte that includes a tumor-directed CAR, or a nucleic acid encoding the tumor-directed CAR. Several embodiments of the methods and compositions disclosed herein relate to monocytes engineered to express a CAR that targets a tumor marker, for example, CD70, CD19, CD123, Her2, mesothelin, Claudin 6, BCMA, EGFR, among others, and optionally includes a membrane-bound interleukin 15 (mbIL15) domain. Several embodiments of the methods and compositions disclosed herein relate to monocytes engineered to express an activating chimeric receptor that targets a ligand on a tumor cell, for example, MICA, MICB, ULBP1, ULBP2, ULBP3, ULBP4, ULBP5, and ULBP6 (among others) and optionally a membrane-bound interleukin 15 (mbIL15) domain.

### Lymphocytes for Immunotherapy

[0154] Lymphocytes, the other primary sub-type of leukocyte include T cells (cell-mediated, cytotoxic adaptive immunity), natural killer cells (cell-mediated, cytotoxic innate immunity), and B cells (humoral, antibody-driven adaptive immunity). While B cells are engineered according to several embodiments, disclosed herein, several embodiments also relate to engineered T cells or engineered NK cells (mixtures of T cells and NK cells are used in some embodiments, either from the same donor, or different donors). Several embodiments of the methods and compositions disclosed herein relate to lymphocytes engineered to express a CAR that targets a tumor marker, for example, CD70, CD19, CD123, Her2, mesothelin, Claudin 6, BCMA, EGFR, among others, and optionally includes a membrane-bound interleukin 15 (mbIL15) domain. Several embodiments of the methods and compositions disclosed herein relate to lymphocytes engineered to express an activating chimeric receptor that targets a ligand on a tumor cell, for example, MICA, MICB, ULBP1, ULBP2, ULBP3, ULBP4, ULBP5, and ULBP6 (among others) and optionally a membrane-bound interleukin 15 (mbIL15) domain.

### T Cells for Immunotherapy

[0155] T cells are distinguishable from other lymphocytes sub-types (e.g., B cells or NK cells) based on the presence of a T-cell receptor on the cell surface. T cells can be divided into various different subtypes, including effector T cells, helper T cells, cytotoxic T cells, memory T cells, regulatory T cells, natural killer T cell, mucosal associated invariant T cells and gamma delta T cells. In some embodiments, a specific subtype of T cell is engineered. In some embodiments, a mixed pool of T cell subtypes is engineered. In some embodiments, there is no specific selection of a type of T cells to be engineered to express the cytotoxic receptor complexes disclosed herein. In several embodiments, specific techniques, such as use of cytokine stimulation are used to enhance expansion/collection of T cells with a specific marker profile. For example, in several embodiments, activation of certain human T cells, e.g. CD4+ T cells, CD8+ T cells is achieved through use of CD3 and/or CD28 as stimulatory molecules. In several embodiments, there is provided a method of treating or preventing cancer or an infectious disease, comprising administering a therapeutically effective amount of T cells expressing the cytotoxic receptor complex and/or a homing moiety as described herein. In several embodiments, the engineered T cells are autologous cells, while in some embodiments, the T cells are allogeneic cells. Several embodiments of the methods and compositions disclosed herein relate to T cells engineered to express a CAR that targets a tumor marker, for example, CD70, CD19, CD123, Her2, mesothelin, Claudin 6, BCMA, EGFR, among others, and optionally includes a membrane-bound interleukin 15 (mbIL15) domain. Several embodiments of the methods and compositions disclosed herein relate to T cells engineered to express an activating chimeric receptor that targets a ligand on a tumor cell, for example, MICA, MICB, ULBP1, ULBP2, ULBP3, ULBP4, ULBP5, and ULBP6 (among others) and optionally a membrane-bound interleukin 15 (mbIL15) co-stimulatory domain.

### NK Cells for Immunotherapy

[0156] In several embodiments, there is provided a method of treating or preventing cancer or an infectious disease, comprising administering a therapeutically effective amount of natural killer (NK) cells expressing the cytotoxic receptor complex and/or a homing moiety as described herein. In several embodiments, the engineered NK cells are autologous cells, while in some embodiments, the NK cells are allogeneic cells. In several embodiments, NK cells are preferred because the natural cytotoxic potential of NK cells is relatively high. In several embodiments, it is unexpectedly beneficial that the engineered cells disclosed herein can further upregulate the cytotoxic activity of NK cells, leading to an even more effective activity against target cells (e.g., tumor or other diseased cells). Some embodiments of the methods and compositions described herein relate to NK cells engineered to express a CAR that targets a tumor marker, for example, CD70, CD19, CD123, Her2, mesothelin, Claudin 6, BCMA, EGFR, among others, and optionally includes a membrane-bound interleukin 15 (mbIL15) domain. Several embodiments of the methods and compositions disclosed herein relate to NK cells engineered to express an activating chimeric receptor that targets a ligand on a tumor cell, for example, MICA, MICB, ULBP1, ULBP2, ULBP3, ULBP4, ULBP5, and ULBP6 (among others) and optionally a membrane-bound interleukin 15 (mbIL15) domain. In several embodiments, immortalized NK cells are used and are subject to gene editing and/or engineering, as disclosed herein. In some embodiments, the NK cells are derived from cell line NK-92. NK-92 cells are derived from NK cells, but lack major inhibitory receptors displayed by normal NK cells, while retaining the majority of activating receptors. Some embodiments of NK-92 cells described herein related to NK-92 cell engineered to silence certain additional inhibitory receptors, for example, SMAD3, allowing for upregulation of interferon-γ (IFNγ), granzyme B, and/or perforin production. Additional information relating to the NK-92 cell line is disclosed in WO 1998/49268 and U.S. Patent Application Publication No. 2002/0068044 and incorporated in their entireties herein by reference. NK-92 cells are used, in several embodiments, in combination with one or more of the other cell types disclosed herein. For example, in one embodiment, NK-92 cells are used in combination with NK cells as disclosed herein. In an additional embodiment, NK-92 cells are used in combination with T cells as disclosed herein.

[0157] In several embodiments, genetic manipulation of NK cells is employed to further enhance the efficacy and/or persistence of the NK cells. For example, in several embodiments, expression of various markers/proteins is reduced, substantially reduced, or knocked out (eliminated) through gene editing techniques. Depending on the embodiment, this may include gene editing to reduce expression of one or more of a cytokine-inducible SH2-containing protein encoded by a CISH gene, a transforming growth factor beta receptor (e.g., TGFBR2), a Natural Killer Group 2, member A (NKG2A) receptor, a Cbl proto-oncogene B protein encoded by a CBLB gene, a tripartite motif-containing protein 29 protein encoded by a TRIM29 gene, a suppressor of cytokine signaling 2 protein encoded by a SOCS2 gene, a mothers against decapentaplegic homolog 3 (SMAD3) protein encoded by a SMAD3 gene, a MAP kinase-activated protein kinase 3 (MAPKAPK3) protein encoded by a MAPKAPK3 gene, a carcinoembryonic antigen-related cell adhesion molecule 1 (CEACAM1) protein encoded by a CEACAM1 gene, and/or a DNA-damage-inducible transcript 4 (DDIT4) protein encoded by a DDIT4 gene. In several embodiments, reduced expression is accomplished through targeted introduction of DNA breakage, and subsequent DNA repair mechanism. In several embodiments, double strand breaks of DNA are repaired by non-homologous end joining (NHEJ), wherein enzymes are used to directly join the DNA ends to one another to repair the break. In several embodiments, however, double strand breaks are repaired by homology directed repair (HDR), which is advantageously more accurate, thereby allowing sequence specific breaks and repair. HDR uses a homologous sequence as a template for regeneration of missing DNA sequences at the break point, such as a vector with the desired genetic elements (e.g., an insertion element to disrupt the coding sequence of the target protein, such as CD70 and/or CISH) within a sequence that is homologous to the flanking sequences of a double strand break. This will result in the desired change (e.g., insertion) being inserted at the site of the DSB.

[0158] In several embodiments, gene editing is accomplished by one or more of a variety of engineered nucleases. In several embodiments, restriction enzymes are used, particularly when double strand breaks are desired at multiple regions. In several embodiments, a bioengineered nuclease is used. Depending on the embodiment, one or more of a Zinc Finger Nuclease (ZFN), transcription-activator like effector nuclease (TALEN), meganuclease and/or clustered regularly interspaced short palindromic repeats (CRISPR/Cas9) system are used to specifically edit the genes encoding one or more target proteins, such as CD70 and/or CISH.

[0159] Meganucleases are characterized by their capacity to recognize and cut large DNA sequences (from 14 to 40 base pairs). In several embodiments, a meganuclease from the LAGLIDADG family is used, and is subjected to mutagenesis and screening to generate a meganuclease variant that recognizes a unique sequence(s), such as a specific site in a gene encoding a target protein of interest. In several embodiments, two or more meganucleases, or functions fragments thereof, are fused to create a hybrid enzymes that recognize a desired target sequence within the gene encoding a target protein of interest, such as CD70 and/or CISH.

[0160] In contrast to meganucleases, ZFNs and TALEN function based on a non-specific DNA cutting catalytic domain which is linked to specific DNA sequence recognizing peptides such as zinc fingers or transcription activator-like effectors (TALEs). Advantageously, the ZFNs and TALENs thus allow sequence-independent cleavage of DNA, with a high degree of sequence-specificity in target recognition. Zinc finger motifs naturally function in transcription factors to recognize specific DNA sequences for transcription. The C-terminal part of each finger is responsible for the specific recognition of the DNA sequence. While the sequences recognized by ZFNs are relatively short, (e.g., ˜3 base pairs), in several embodiments, combinations of 2, 3, 4, 5, 6, 7, 8, 9, 10 or more zinc fingers whose recognition sites have been characterized are used, thereby allowing targeting of specific sequences, such as a portion of the gene encoding a target protein normally expressed by NK cells, such as CD70 and/or CISH. The combined ZFNs are then fused with the catalytic domain(s) of an endonuclease, such as FokI (optionally a FokI heterodimer), in order to induce a targeted DNA break. Additional information on uses of ZFNs to edit a target gene of interest, such as CD70 or CISH can be found in U.S. Pat. No. 9,597,357, which is incorporated by reference herein.

[0161] Transcription activator-like effector nucleases (TALENs) are specific DNA-binding proteins that feature an array of 33 or 34-amino acid repeats. Like ZFNs, TALENs are a fusion of a DNA cutting domain of a nuclease to TALE domains, which allow for sequence-independent introduction of double stranded DNA breaks with highly precise target site recognition. TALENs can create double strand breaks at the target site that can be repaired by error-prone non-homologous end-joining (NHEJ), resulting in gene disruptions through the introduction of small insertions or deletions. Advantageously, TALENs are used in several embodiments, at least in part due to their higher specificity in DNA binding, reduced off-target effects, and case in construction of the DNA-binding domain.

[0162] CRISPRs (Clustered Regularly Interspaced Short Palindromic Repeats) are genetic elements that bacteria use as protection against viruses. The repeats are short sequences that originate from viral genomes and have been incorporated into the bacterial genome. Cas (CRISPR associated proteins) process these sequences and cut matching viral DNA sequences. By introducing plasmids containing Cas genes and specifically constructed CRISPRs into eukaryotic cells, the eukaryotic genome can be cut at any desired position. Additional information on CRISPR can be found in US Patent Publication No. 2014/0068797, which is incorporated by reference herein. In several embodiments, CRISPR is used to manipulate the genes encoding on or more of the TCRs of a T cell and/or the genes encoding one or more immune checkpoint inhibitors. In several embodiments, the immune checkpoint inhibitor is selected from one or more of CTLA4 and PD1. In several embodiments, native CD70 expression by NK cells is disrupted or substantially eliminated by targeting the CD70 encoding gene with a CRISPR/Cas system. In several embodiments, one or more additional target proteins, normally expressed by an NK cells is disrupted or substantially eliminated by targeting the corresponding encoding gene with a CRISPR/Cas system. Depending on the embodiment, one or more of a cytokine-inducible SH2-containing protein encoded by a CISH gene, a transforming growth factor beta receptor (e.g., TGFBR2), a Natural Killer Group 2, member A (NKG2A) receptor, a Cbl proto-oncogene B protein encoded by a CBLB gene, a tripartite motif-containing protein 29 protein encoded by a TRIM29 gene, a suppressor of cytokine signaling 2 protein encoded by a SOCS2 gene, a SMAD3 protein encoded by a SMAD3 gene, a MAPKAPK3 protein encoded by a MAPKAPK3 gene, a CEACAM1 protein encoded by a CEACAM1 gene, and/or a DDIT4 protein encoded by a DDIT4 gene is targeted with a CRISPR/Cas system. Depending on the embodiment, a Class 1 or Class 2 Cas is used. In several embodiments, a Class 1 Cas is used, and the Cas type is selected from the following types: I, IA, IB, IC, ID, IE, IF, IU, III, IIIA, IIIB, IIIC, IIID, IV IVA, IVB, and combinations thereof. In several embodiments, the Cas is selected from the group consisting of Cas3, Cas8a, Cas5, Cas8b, Cas8c, Cas10d, Cse1, Cse2, Csy1, Csy2, Csy3, GSU0054, Cas10, Csm2, Cmr5, Cas10, Csx11, Csx10, Csf1, and combinations thereof. In several embodiments, a Class 2 Cas is used, and the Cas type is selected from the following types: II, IIA, IIB, IIC, V, VI, and combinations thereof. In several embodiments, the Cas is selected from the group consisting of Cas9, Csn2, Cas4, Cpf1, C2c1, C2c3, Cas13a (previously known as C2c2), Cas13b, Cas13c, CasX, CasY and combinations thereof. In some embodiments, class 2 CasX is used, wherein CasX is capable of forming a complex with a guide nucleic acid and wherein the complex can bind to a target DNA, and wherein the target DNA comprises a non-target strand and a target strand. In some embodiments, class 2 CasY is used, wherein CasY is capable of binding and modifying a target nucleic acid and/or a polypeptide associated with target nucleic acid.

### Hematopoietic Stem Cells for Cancer Immunotherapy

[0163] In some embodiments, hematopoietic stem cells (HSCs) are used in the methods of immunotherapy disclosed herein. In several embodiments, the cells are engineered to express a homing moiety and/or a cytotoxic receptor complex. HSCs are used, in several embodiments, to leverage their ability to engraft for long-term blood cell production, which could result in a sustained source of targeted anti-cancer effector cells, for example to combat cancer remissions. In several embodiments, this ongoing production helps to offset anergy or exhaustion of other cell types, for example due to the tumor microenvironment. In several embodiments allogeneic HSCs are used, while in some embodiments, autologous HSCs are used. In several embodiments, HSCs are used in combination with one or more additional engineered cell type disclosed herein. Some embodiments of the methods and compositions described herein relate to a stem cell, such as a hematopoietic stem cell engineered to express a CAR that targets a tumor marker, for example, CD70, CD19, CD123, CD70, Her2, mesothelin, Claudin 6, BCMA, EGFR, among others, and optionally includes a membrane-bound interleukin 15 (mbIL15) domain. Several embodiments of the methods and compositions disclosed herein relate to hematopoietic stem cells engineered to express an activating chimeric receptor that targets a ligand on a tumor cell, for example, MICA, MICB, ULBP1, ULBP2, ULBP3, ULBP4, ULBP5, and ULBP6 (among others) and optionally includes a membrane-bound interleukin 15 (mbIL15) domain.

### Induced Pluripotent Stem Cells

[0164] In some embodiments, induced pluripotent stem cells (iPSCs) are used in the method of immunotherapy disclosed herein. iPSCs are used, in several embodiments, to leverage their ability to differentiate and derive into non-pluripotent cells, including, but not limited to, CD34 cells, hemogenic endothelium cells, HSCs (hematopoietic stem and progenitor cells), hematopoietic multipotent progenitor cells, T cell progenitors, NK cell progenitors, T cells, NKT cells, NK cells, and B cells comprising one or several genetic modifications at selected sites through differentiating iPSCs or less differentiated cells comprising the same genetic modifications at the same selected sites. In several embodiments, the iPSCs are used to generate iPSC-derived NK or T cells. In several embodiments, the cells are engineered to express a homing moiety and/or a cytotoxic receptor complex. In several embodiments, iPSCs are used in combination with one or more additional engineered cell type disclosed herein. Some embodiments of the methods and compositions described herein relate to a stem cell, such as a induced pluripotent stem cell engineered to express a CAR that targets a tumor marker, for example, CD19, CD123, CD70, Her2, mesothelin, Claudin 6, BCMA, EGFR, among any of the others disclosed herein, and optionally a membrane-bound interleukin 15 (mbIL15) co-stimulatory domain. Several embodiments of the methods and compositions disclosed herein relate to induced pluripotent stem cells engineered to express an activating chimeric receptor that targets a ligand on a tumor cell, for example, MICA, MICB, ULBP1, ULBP2, ULBP3, ULBP4, ULBP5, and ULBP6 (among others) and optionally a membrane-bound interleukin 15 (mbIL15) co-stimulatory domain.

### Genetic Engineering of Immune Cells

[0165] As discussed above, a variety of cell types can be utilized in cellular immunotherapy. Further, as elaborated on in more detail below, and shown in the Examples, genetic modifications can be made to these cells in order to enhance one or more aspects of their efficacy (e.g., cytotoxicity) and/or persistence (e.g., active life span). As discussed herein, in several embodiments NK cells are used for immunotherapy. In several embodiments provided for herein, gene editing of an NK cells imparts to the cell various beneficial characteristics such as, for example, enhanced proliferation, enhanced cytotoxicity, and/or enhanced persistence. In several embodiments provided for herein, gene editing of the NK cell can advantageously impart to the edited NK cell the ability to resist and/or overcome various inhibitory signals that are generated in the tumor microenvironment. It is known that tumors generate a variety of signaling molecules that are intended to reduce the anti-tumor effects of immune cells. As discussed in more detail below, in several embodiments, gene editing of the NK cell limits this tumor microenvironment suppressive effect on the NK cells, T cells, combinations of NK and T cells, or any edited/engineered immune cell provided for herein.

[0166] As discussed below, in several embodiments, gene editing is employed to reduce or knockout expression of target proteins, for example by disrupting the underlying gene encoding the protein. In several embodiments, gene editing can reduce expression of a target protein by about 30%, about 40%, about 50%, about 60%, about 70%, about 75%, about 80%, about 85%, about 90%, about 95%, about 97%, about 98%, about 99%, or more (including any amount between those listed). In several embodiments, the gene is completely knocked out, such that expression of the target protein is undetectable. In several embodiments, gene editing is used to “knock in” or otherwise enhance expression of a target protein. In several embodiments, expression of a target protein can be enhanced by about 30%, about 40%, about 50%, about 60%, about 70%, about 75%, about 80%, about 85%, about 90%, about 95%, about 97%, about 98%, about 99%, or more (including any amount between those listed).

[0167] In accordance with additional embodiments, other modulators of one or more aspects of NK cell (or T cell) function are modulated through gene editing. A variety of cytokines impart either negative (as with TGF-beta above) or positive signals to immune cells. By way of non-limiting example, IL15 is a positive regulator of NK cells, which as disclosed herein, can enhance one or more of NK cell homing, NK cell migration, NK cell expansion/proliferation, NK cell cytotoxicity, and/or NK cell persistence. To keep NK cells in check under normal physiological circumstances, a cytokine-inducible SH2-containing protein (CIS, encoded by the CISH gene) acts as a critical negative regulator of IL-15 signaling in NK cells. As discussed herein, because IL15 biology impacts multiple aspects of NK cell functionality, including, but not limited to, proliferation/expansion, activation, cytotoxicity, persistence, homing, migration, among others. Thus, according to several embodiments, editing CISH enhances the functionality of NK cells across multiple functionalities, leading to a more effective and long-lasting NK cell therapeutic. In several embodiments, inhibitors of CIS are used in conjunction with engineered NK cell administration. In several embodiments, the CIS expression is knocked down or knocked out through gene editing of the CISH gene, for example, by use of CRISPR-Cas editing. Small interfering RNA, antisense RNA, TALENs or zinc fingers are used in other embodiments. In some embodiments CIS expression in T cells is knocked down through gene editing.

[0168] In several embodiments, CISH gene editing endows an NK cell with enhanced ability to home to a target site. In several embodiments, CISH gene editing endows an NK cell with enhanced ability to migrate, e.g., within a tissue in response to, for example chemoattractants or away from repellants. In several embodiments, CISH gene editing endows an NK cell with enhanced ability to be activated, and thus exert, for example, anti-tumor effects. In several embodiments, CISH gene editing endows an NK cell with enhanced proliferative ability, which in several embodiments, allows for generation of robust NK cell numbers from a donor blood sample. In addition, in such embodiments, NK cells edited for CISH and engineered to express a CAR are more readily, robustly, and consistently expanded in culture. In several embodiments, CISH gene editing endows an NK cell with enhanced cytotoxicity. In several embodiments, the editing of CISH synergistically enhances the cytotoxic effects of engineered NK cells and/or engineered T cells that express a CAR.

[0169] In several embodiments, CISH gene editing activates or inhibits a wide variety of pathways. The CIS protein is a negative regulator of IL15 signaling by way of, for example, inhibiting JAK-STAT signaling pathways. These pathways would typically lead to transcription of IL15-responsive genes (including CISH). In several embodiments, knockdown of CISH disinhibits JAK-STAT (e.g., JAK1-STAT5) signaling and there is enhanced transcription of IL15-responsive genes. In several embodiments, knockout of CISH yields enhanced signaling through mammalian target of rapamycin (mTOR), with corresponding increases in expression of genes related to cell metabolism and respiration. In several embodiments, knockout of CISH yields IL15 induced increased expression of IL-2Rα (CD25), but not IL-15Rα or IL-2/15Rβ, enhanced NK cell membrane binding of IL15 and/or IL2, increased phosphorylation of STAT-3 and/or STAT-5, and elevated expression of the antiapoptotic proteins, such as Bcl-2. In several embodiments, CISH knockout results in IL15-induced upregulation of selected genes related to mitochondrial functions (e.g., electron transport chain and cellular respiration) and cell cycle. Thus, in several embodiments, knockout of CISH by gene editing enhances the NK cell cytotoxicity and/or persistence, at least in part via metabolic reprogramming. In several embodiments, negative regulators of cellular metabolism, such as TXNIP, are downregulated in response to CISH knockout. In several embodiments, promotors for cell survival and proliferation including BIRC5 (Survivin), TOP2A, CKS2, and RACGAP1 are upregulated after CISH knockout, whereas antiproliferative or proapoptotic proteins such as TGFB1, ATM, and PTCH1 are downregulated. In several embodiments, CISH knockout alters the state (e.g., activates or inactivates) signaling via or through one or more of CXCL-10, IL2, TNF, IFNg, IL13, IL4, Jnk, PRF1, STAT5, PRKCQ, IL2 receptor Beta, SOCS2, MYD88, STAT3, STAT1, TBX21, LCK, JAK3, IL& receptor, ABL1, IL9, STAT5A, STAT5B, Tcf7, PRDM1, and/or EOMES.

[0170] In several embodiments, gene editing of the immune cells can also provide unexpected enhancement in the expansion, persistence and/or cytotoxicity of the edited immune cell. As disclosed herein, engineered cells (e.g., those expressing a CAR) may also be edited, the combination of which provides for a robust cell for immunotherapy. In several embodiments, the edits allow for unexpectedly improved NK cell expansion, persistence and/or cytotoxicity. In several embodiments, knockout of CISH expression in NK cells removes a potent negative regulator of IL15-mediated signaling in NK cells, disinhibits the NK cells and allows for one or more of enhanced NK cell homing, NK cell migration, activation of NK cells, expansion, cytotoxicity and/or persistence. Additionally, in several embodiments, the editing can enhance NK and/or T cell function in the otherwise suppressive tumor microenvironment. In several embodiments, CISH gene editing results in enhanced NK cell expansion, persistence and/or cytotoxicity without requiring Notch ligand being provided exogenously.

[0171] By way of non-limiting example, TGF-beta is one such cytokine released by tumor cells that results in immune suppression within the tumor microenvironment. That immune suppression reduces the ability of immune cells, even engineered CAR-immune cells is some cases, to destroy the tumor cells, thus allowing for tumor progression. In several embodiments, as discussed in detail below, immune checkpoint inhibitors are disrupted through gene editing. In several embodiments, blockers of immune suppressing cytokines in the tumor microenvironment are used, including blockers of their release or competitive inhibitors that reduce the ability of the signaling molecule to bind and inhibit an immune cell. Such signaling molecules include, but are not limited to TGF-beta, IL 10, arginase, inducible NOS, reactive-NOS, Arg1, Indoleamine 2,3-dioxygenase (IDO), and PGE₂. However, in additional embodiments, there are provided immune cells, such as NK cells, wherein the ability of the NK cell (or other cell) to respond to a given immunosuppressive signaling molecule is disrupted and/or eliminated. For example, in several embodiments, in several embodiments, NK cells or T cells are genetically edited to become have reduced sensitivity to TGF-beta. TGF-beta is an inhibitor of NK cell function on at least the levels of proliferation and cytotoxicity. See, for example, FIG. 8A which schematically shows some of the inhibitory pathways by which TGF-beta reduces NK cell activity and/or proliferation. Thus, according to some embodiments, the expression of the TGF-beta receptor is knocked down or knocked out through gene editing, such that the edited NK is resistant to the immunosuppressive effects of TGF-beta in the tumor microenvironment. In several embodiments, the TGFB2 receptor is knocked down or knocked out through gene editing, for example, by use of CRISPR-Cas editing. Small interfering RNA, antisense RNA, TALENs or zinc fingers are used in other embodiments. Other isoforms of the TGF-beta receptor (e.g., TGF-beta 1 and/or TGF-beta 3) are edited in some embodiments. In some embodiments TGF-beta receptors in T cells are knocked down through gene editing.

### Extracellular Domains (Tumor Binder)

[0172] Some embodiments of the compositions and methods described herein relate to a chimeric antigen receptor that includes an extracellular domain that comprises a tumor-binding domain (also referred to as an antigen-binding protein or antigen-binding domain) as described herein. The tumor binding domain, depending on the embodiment, targets, for example CD70, CD19, CD123, Her2, mesothelin, Claudin 6, BCMA, EGFR, among others. Several embodiments of the compositions and methods described herein relate to a chimeric receptor that includes an extracellular domain that comprises a ligand binding domain that binds a ligand expressed by a tumor cell (also referred to as an activating chimeric receptor) as described herein. The ligand binding domain, depending on the embodiment, targets for example MICA, MICB, ULBP1, ULBP2, ULBP3, ULBP4, ULBP5, and ULBP6 (among others).

[0173] In some embodiments, the antigen-binding domain is derived from or comprises wild-type or non-wild-type sequence of an antibody, an antibody fragment, an scFv, a Fv, a Fab, a (Fab′)2, a single domain antibody (SDAB), a vH or vL domain, a camelid VHH domain, or a non-immunoglobulin scaffold such as a DARPIN, an affibody, an affilin, an adnectin, an affitin, a repebody, a fynomer, an alphabody, an avimer, an atrimer, a centyrin, a pronectin, an anticalin, a kunitz domain, an Armadillo repeat protein, an autoantigen, a receptor or a ligand. In some embodiments, the tumor-binding domain contains more than one antigen binding domain.

### Antigen-Binding Proteins

[0174] There are provided, in several embodiments, antigen-binding proteins. As used herein, the term “antigen-binding protein” shall be given its ordinary meaning, and shall also refer to a protein comprising an antigen-binding fragment that binds to an antigen and, optionally, a scaffold or framework portion that allows the antigen-binding fragment to adopt a conformation that promotes binding of the antigen-binding protein to the antigen. In some embodiments, the antigen is a cancer antigen (e.g., CD70) or a fragment thereof. In some embodiments, the antigen-binding fragment comprises at least one CDR from an antibody that binds to the antigen. In some embodiments, the antigen-binding fragment comprises all three CDRs from the heavy chain of an antibody that binds to the antigen or from the light chain of an antibody that binds to the antigen. In still some embodiments, the antigen-binding fragment comprises all six CDRs from an antibody that binds to the antigen (three from the heavy chain and three from the light chain). In several embodiments, the antigen-binding fragment comprises one, two, three, four, five, or six CDRs from an antibody that binds to the antigen, and in several embodiments, the CDRs can be any combination of heavy and/or light chain CDRs. The antigen-binding fragment in some embodiments is an antibody fragment.

[0175] Non-limiting examples of antigen-binding proteins include antibodies, antibody fragments (e.g., an antigen-binding fragment of an antibody), antibody derivatives, and antibody analogs. Further specific examples include, but are not limited to, a single-chain variable fragment (scFv), a nanobody (e.g. VH domain of camelid heavy chain antibodies; VHH fragment,), a Fab fragment, a Fab′ fragment, a F(ab′)2 fragment, a Fv fragment, a Fd fragment, and a complementarity determining region (CDR) fragment. These molecules can be derived from any mammalian source, such as human, mouse, rat, rabbit, or pig, dog, or camelid. Antibody fragments may compete for binding of a target antigen with an intact (e.g., native) antibody and the fragments may be produced by the modification of intact antibodies (e.g. enzymatic or chemical cleavage) or synthesized de novo using recombinant DNA technologies or peptide synthesis. The antigen-binding protein can comprise, for example, an alternative protein scaffold or artificial scaffold with grafted CDRs or CDR derivatives. Such scaffolds include, but are not limited to, antibody-derived scaffolds comprising mutations introduced to, for example, stabilize the three-dimensional structure of the antigen-binding protein as well as wholly synthetic scaffolds comprising, for example, a biocompatible polymer. In addition, peptide antibody mimetics (“PAMs”) can be used, as well as scaffolds based on antibody mimetics utilizing fibronectin components as a scaffold.

[0176] In some embodiments, the antigen-binding protein comprises one or more antibody fragments incorporated into a single polypeptide chain or into multiple polypeptide chains. For instance, antigen-binding proteins can include, but are not limited to, a diabody; an intrabody; a domain antibody (single VL or VH domain or two or more VH domains joined by a peptide linker;); a maxibody (2 scFvs fused to Fc region); a triabody; a tetrabody; a minibody (scFv fused to CH3 domain); a peptibody (one or more peptides attached to an Fc region); a linear antibody (a pair of tandem Fd segments (VH-CH1-VH-CH1) which, together with complementary light chain polypeptides, form a pair of antigen binding regions); a small modular immunopharmaceutical; and immunoglobulin fusion proteins (e.g. IgG-scFv, IgG-Fab, 2scFv-IgG, 4scFv-IgG, VH-IgG, IgG-VH, and Fab-scFv-Fc).

[0177] In some embodiments, the antigen-binding protein has the structure of an immunoglobulin. As used herein, the term “immunoglobulin” shall be given its ordinary meaning, and shall also refer to a tetrameric molecule, with each tetramer comprising two identical pairs of polypeptide chains, each pair having one “light” (about 25 kDa) and one “heavy” chain (about 50-70 kDa). The amino-terminal portion of each chain includes a variable region of about 100 to 110 or more amino acids primarily responsible for antigen recognition. The carboxy-terminal portion of each chain defines a constant region primarily responsible for effector function.

[0178] Within light and heavy chains, the variable (V) and constant regions (C) are joined by a “J” region of about 12 or more amino acids, with the heavy chain also including a “D” region of about 10 more amino acids. The variable regions of each light/heavy chain pair form the antibody binding site such that an intact immunoglobulin has two binding sites.

[0179] Immunoglobulin chains exhibit the same general structure of relatively conserved framework regions (FR) joined by three hypervariable regions, also called complementarity determining regions or CDRs. From N-terminus to C-terminus, both light and heavy chains comprise the domains FR1, CDR1, FR2, CDR2, FR3, CDR3 and FR4.

[0180] Human light chains are classified as kappa and lambda light chains. An antibody “light chain”, refers to the smaller of the two types of polypeptide chains present in antibody molecules in their naturally occurring conformations. Kappa (K) and lambda (2) light chains refer to the two major antibody light chain isotypes. A light chain may include a polypeptide comprising, from amino terminus to carboxyl terminus, a single immunoglobulin light chain variable region (VL) and a single immunoglobulin light chain constant domain (CL).

[0181] Heavy chains are classified as mu (u), delta (A), gamma (Y), alpha (a), and epsilon (¿), and define the antibody's isotype as IgM, IgD, IgG, IgA, and IgE, respectively. An antibody “heavy chain” refers to the larger of the two types of polypeptide chains present in antibody molecules in their naturally occurring conformations, and which normally determines the class to which the antibody belongs. A heavy chain may include a polypeptide comprising, from amino terminus to carboxyl terminus, a single immunoglobulin heavy chain variable region (VH), an immunoglobulin heavy chain constant domain 1 (CH1), an immunoglobulin hinge region, an immunoglobulin heavy chain constant domain 2 (CH2), an immunoglobulin heavy chain constant domain 3 (CH3), and optionally an immunoglobulin heavy chain constant domain 4 (CH4).

[0182] The IgG-class is further divided into subclasses, namely, IgG1, IgG2, IgG3, and IgG4. The IgA-class is further divided into subclasses, namely IgA1 and IgA2. The IgM has subclasses including, but not limited to, IgM1 and IgM2. The heavy chains in IgG, IgA, and IgD antibodies have three domains (CH1, CH2, and CH3), whereas the heavy chains in IgM and IgE antibodies have four domains (CH1, CH2, CH3, and CH4). The immunoglobulin heavy chain constant domains can be from any immunoglobulin isotype, including subtypes. The antibody chains are linked together via inter-polypeptide disulfide bonds between the CL domain and the CH1 domain (e.g., between the light and heavy chain) and between the hinge regions of the antibody heavy chains.

[0183] In some embodiments, the antigen-binding protein is an antibody. The term “antibody”, as used herein, refers to a protein, or polypeptide sequence derived from an immunoglobulin molecule which specifically binds with an antigen. Antibodies can be monoclonal, or polyclonal, multiple or single chain, or intact immunoglobulins, and may be derived from natural sources or from recombinant sources. Antibodies can be tetramers of immunoglobulin molecules. The antibody may be “humanized”, “chimeric” or non-human. An antibody may include an intact immunoglobulin of any isotype, and includes, for instance, chimeric, humanized, human, and bispecific antibodies. An intact antibody will generally comprise at least two full-length heavy chains and two full-length light chains. Antibody sequences can be derived solely from a single species, or can be “chimeric,” that is, different portions of the antibody can be derived from two different species as described further below. Unless otherwise indicated, the term “antibody” also includes antibodies comprising two substantially full-length heavy chains and two substantially full-length light chains provided the antibodies retain the same or similar binding and/or function as the antibody comprised of two full length light and heavy chains. For example, antibodies having 1, 2, 3, 4, or 5 amino acid residue substitutions, insertions or deletions at the N-terminus and/or C-terminus of the heavy and/or light chains are included in the definition provided that the antibodies retain the same or similar binding and/or function as the antibodies comprising two full length heavy chains and two full length light chains. Examples of antibodies include monoclonal antibodies, polyclonal antibodies, chimeric antibodies, humanized antibodies, human antibodies, bispecific antibodies, and synthetic antibodies. There is provided, in some embodiments, monoclonal and polyclonal antibodies. As used herein, the term “polyclonal antibody” shall be given its ordinary meaning, and shall also refer to a population of antibodies that are typically widely varied in composition and binding specificity. As used herein, the term “monoclonal antibody” (“mAb”) shall be given its ordinary meaning, and shall also refer to one or more of a population of antibodies having identical sequences. Monoclonal antibodies bind to the antigen at a particular epitope on the antigen.

[0184] In some embodiments, the antigen-binding protein is a fragment or antigen-binding fragment of an antibody. The term “antibody fragment” refers to at least one portion of an antibody, that retains the ability to specifically interact with (e.g., by binding, steric hindrance, stabilizing/destabilizing, spatial distribution) an epitope of an antigen. Examples of antibody fragments include, but are not limited to, Fab, Fab′, F(ab′)2, Fv fragments, scFv antibody fragments, disulfide-linked Fvs (sdFv), a Fd fragment consisting of the VH and CH1 domains, linear antibodies, single domain antibodies such as sdAb (either vL or vH), camelid vHH domains, multi-specific antibodies formed from antibody fragments such as a bivalent fragment comprising two Fab fragments linked by a disulfide bridge at the hinge region, and an isolated CDR or other epitope binding fragments of an antibody. An antigen binding fragment can also be incorporated into single domain antibodies, maxibodies, minibodies, nanobodies, intrabodies, diabodies, triabodies, tetrabodies, v-NAR and bis-scFv (see, e.g., Hollinger and Hudson, Nature Biotechnology 23:1126-1136, 2005). Antigen binding fragments can also be grafted into scaffolds based on polypeptides such as a fibronectin type III (Fn3) (see U.S. Pat. No. 6,703,199, which describes fibronectin polypeptide mini bodies). An antibody fragment may include a Fab, Fab′, F(ab′)2, and/or Fv fragment that contains at least one CDR of an immunoglobulin that is sufficient to confer specific antigen binding to a cancer antigen (e.g., CD19). Antibody fragments may be produced by recombinant DNA techniques or by enzymatic or chemical cleavage of intact antibodies.

[0185] In some embodiments, Fab fragments are provided. A Fab fragment is a monovalent fragment having the VL, VH, CL and CH1 domains; a F(ab′)2 fragment is a bivalent fragment having two Fab fragments linked by a disulfide bridge at the hinge region; a Fd fragment has the VH and CH1 domains; an Fv fragment has the VL and VH domains of a single arm of an antibody; and a dAb fragment has a VH domain, a VL domain, or an antigen-binding fragment of a VH or VL domain. In some embodiments, these antibody fragments can be incorporated into single domain antibodies, single-chain antibodies, maxibodies, minibodies, intrabodies, diabodies, triabodies, tetrabodies, v-NAR and bis-scFv. In some embodiments, the antibodies comprise at least one CDR as described herein.

[0186] There is also provided for herein, in several embodiments, single-chain variable fragments. As used herein, the term “single-chain variable fragment” (“scFv”) shall be given its ordinary meaning, and shall also refer to a fusion protein in which a VL and a VH region are joined via a linker (e.g., a synthetic sequence of amino acid residues) to form a continuous protein chain wherein the linker is long enough to allow the protein chain to fold back on itself and form a monovalent antigen binding site). For the sake of clarity, unless otherwise indicated as such, a “single-chain variable fragment” is not an antibody or an antibody fragment as defined herein. Diabodies are bivalent antibodies comprising two polypeptide chains, wherein each polypeptide chain comprises VH and VL domains joined by a linker that is configured to reduce or not allow for pairing between two domains on the same chain, thus allowing each domain to pair with a complementary domain on another polypeptide chain. According to several embodiments, if the two polypeptide chains of a diabody are identical, then a diabody resulting from their pairing will have two identical antigen binding sites. Polypeptide chains having different sequences can be used to make a diabody with two different antigen binding sites. Similarly, tribodies and tetrabodies are antibodies comprising three and four polypeptide chains, respectively, and forming three and four antigen binding sites, respectively, which can be the same or different.

[0187] In several embodiments, the antigen-binding protein comprises one or more CDRs. As used herein, the term “CDR” shall be given its ordinary meaning, and shall also refer to the complementarity determining region (also termed “minimal recognition units” or “hypervariable region”) within antibody variable sequences. The CDRs permit the antigen-binding protein to specifically bind to a particular antigen of interest. There are three heavy chain variable region CDRs (CDR-H1, CDR-H2 and CDR-H3) and three light chain variable region CDRs (CDR-L1, CDR-L2 and CDR-L3). The CDRs in each of the two chains typically are aligned by the framework regions to form a structure that binds specifically to a specific epitope or domain on the target protein. From N-terminus to C-terminus, naturally-occurring light and heavy chain variable regions both typically conform to the following order of these elements: FW1, CDR1, FW2, CDR2, FW3, CDR3, FW4. For heavy chain variable regions, the order is typically: FW-H1, CDR-H1, FW-H2, CDR-H2, FW-H3, CDR-H3, and FW-H4 from N-terminus to C-terminus. For light chain variable regions, the order is typically: FW-L1, CDR-L1, FW-L2, CDR-L2, FW-L3, CDR-L3, FW-L4 from N-terminus to C-terminus. A numbering system has been devised for assigning numbers to amino acids that occupy positions in each of these domains. This numbering system is defined in Kabat Sequences of Proteins of Immunological Interest (1987 and 1991, NIH, Bethesda, MD), or Chothia & Lesk, 1987, J. Mol. Biol. 196:901-917; Chothia et al., 1989, Nature 342:878-883. Complementarity determining regions (CDRs) and framework regions (FR) of a given antibody may be identified using this system. Other numbering systems for the amino acids in immunoglobulin chains include IMGT® (the international ImMunoGeneTics information system; Lefranc et al, Dev. Comp. Immunol. 29:185-203; 2005) and AHo (Honegger and Pluckthun, J. Mol. Biol. 309 (3): 657-670; 2001). The binding domains disclosed herein may utilize CDRs defined according to any of these systems. For any given embodiment containing more than one CDR, the CDRs may be defined in accordance with any of Kabat, Chothia, extended, IMGT, Paratome, AbM, and/or conformational definitions, or a combination of any of the foregoing. Any of the CDRs, either separately or within the context of variable domains, can be interpreted by one of skill in the art under any of these numbering systems as appropriate. One or more CDRs may be incorporated into a molecule either covalently or noncovalently to make it an antigen-binding protein.

[0188] In some embodiments, the antigen-binding proteins provided herein comprise one or more CDR(s) as part of a larger polypeptide chain. In some embodiments, the antigen-binding proteins covalently link the one or more CDR(s) to another polypeptide chain. In some embodiments, the antigen-binding proteins incorporate the one or more CDR(s) noncovalently. In some embodiments, the antigen-binding proteins may comprise at least one of the CDRs described herein incorporated into a biocompatible framework structure. In some embodiments, the biocompatible framework structure comprises a polypeptide or portion thereof that is sufficient to form a conformationally stable structural support, or framework, or scaffold, which is able to display one or more sequences of amino acids that bind to an antigen (e.g., CDRs, a variable region, etc.) in a localized surface region. Such structures can be a naturally occurring polypeptide or polypeptide “fold” (a structural motif), or can have one or more modifications, such as additions, deletions and/or substitutions of amino acids, relative to a naturally occurring polypeptide or fold. Depending on the embodiment, the scaffolds can be derived from a polypeptide of a variety of different species (or of more than one species), such as a human, a non-human primate or other mammal, other vertebrate, invertebrate, plant, bacteria or virus.

[0189] The term “consensus sequence” as used herein with regard to sequences refers to the generalized sequence representing all of the different combinations of permissible amino acids at each location of a group of sequences. A consensus sequence may provide insight into the conserved regions of related sequences where the unit (e.g. amino acid or nucleotide) is the same in most or all of the sequences, and regions that exhibit divergence between sequences. In the case of antibodies, the consensus sequence of a CDR may indicate amino acids that are important or dispensable for antigen binding. It is envisioned that consensus sequences may be prepared with any of the sequences provided herein, and the resultant various sequences derived from the consensus sequence can be validated to have similar effects as the template sequences.

[0190] In some embodiments, the antibody or binding fragment thereof comprises a combination of a CDR-H1, CDR-H2, CDR-H3, CDR-L1, CDR-L2, and a CDR-L3 where one or more of these CDRs is defined by a consensus sequence. The consensus sequences provided herein have been derived from the alignments of CDRs provided for herein. However, it is envisioned that alternative alignments may be done (e.g. using global or local alignment, or with different algorithms, such as Hidden Markov Models, seeded guide trees, Needleman-Wunsch algorithm, or Smith-Waterman algorithm) and as such, alternative consensus sequences can be derived.

[0191] In some embodiments, the CDR-H1 is defined by the formula X₁TFX₄X₅X₆X₇X₈X₉ (SEQ ID NO: 1202), where X₁ is G or Y; X₄ is R or T; X₅ is D, E, N, or S; X₆ is Nor Y; X₇ is A, D, E, G, or Y; X₈ is I, L, or M; and X₉ is H, N, or S. In some embodiments, the CDR-H1 comprises a sequence having at least 80%, 81%, 82%, 83%, 84%, 85%, 86%, 87%, 88%, 89%, 90%, 91%, 92%, 93%, 94%, 95%, 96%, 97%, 98%, 99%, or 100% identity to this consensus sequence. In some embodiments, the CDR-H1 comprises a sequence having 0, 1, 2, 3, 4, 5, or 6 substitutions from this consensus sequence.

[0192] In some embodiments, the CDR-H2 is defined by the formula GX₂X₃X₄X₅X₆X₇GX₉X₁₀X₁₁YA (SEQ ID NO: 1203), where X₂ is G, I, V, or W; X₃ is I or M; X₄ is I, N, or S; X₅ is A or P; X₆ is I, N, S, or Y; X₇ is F, G, N, or S; X₉ is A, D, G, H, N, S or T; X₁₀ is A or T; and X₁₁ or G, I, N, or S. In some embodiments, the CDR-H2 comprises a sequence having at least 80%, 81%, 82%, 83%, 84%, 85%, 86%, 87%, 88%, 89%, 90%, 91%, 92%, 93%, 94%, 95%, 96%, 97%, 98%, 99%, or 100% identity to this consensus sequence. In some embodiments, the CDR-H2 comprises a sequence having 0, 1, 2, 3, 4, 5, or 6 substitutions from this consensus sequence.

[0193] In some embodiments, the CDR-H3 is defined by the formula CAX₃X₄X₅X₆X₇X₈X₉X₁₀X₁₁X₁₂X₁₃X₁₄X₁₅X₁₆X₁₇X₁₈X₁₉X₂₀W (SEQ ID NO: 1204), where X₁ is C; X₂ is A; X₃ is G, K, or R; X₄ is D, E, G, S, or Y; X₅ is F, H, I, M, P, R, S, W, or Y; X₆ is G, S, or V; X₇ is no amino acid, A, D, G, or V; X₈ is no amino acid, A, G, N, W, or Y; X₉ is no amino acid, A, P, T, or Y; X₁₀ is no amino acid, A, E, G, H, R, or Y; X₁₁ is no amino acid, A, D, G, H, or S; X₁₂ is no amino acid, D, F, G, or W; X₁₃ is no amino acid, A, D, E, G, V, or Y; X₁₄ is no amino acid, F, M, or Y; X₁₅ is no amino acid or Y; X₁₆ is no amino acid or Y; X₁₇ is no amino acid or G; X₁₈ is no amino acid or M; X₁₉ is D or G; and X₂₀ is I, L, V, or Y. In some embodiments, the CDR-H3 comprises a sequence having at least 80%, 81%, 82%, 83%, 84%, 85%, 86%, 87%, 88%, 89%, 90%, 91%, 92%, 93%, 94%, 95%, 96%, 97%, 98%, 99%, or 100% identity to this consensus sequence. In some embodiments, the CDR-H3 comprises a sequence having 0, 1, 2, 3, 4, 5, or 6 substitutions from this consensus sequence.

[0194] In some embodiments, the CDR-L1 is defined by the formula X₁ASQX₅X₆X₇X₈X₉LX₁₁ (SEQ ID NO: 1205), where X₁ is Q or R; X₅ is D, G, S, or T; X₆ is I or V; X₇ is G, R, or S; X₈ is N, R, or S; X₉ is F, W, or Y; and X₁₁ is A or N. In some embodiments, the CDR-L1 comprises a sequence having at least 80%, 81%, 82%, 83%, 84%, 85%, 86%, 87%, 88%, 89%, 90%, 91%, 92%, 93%, 94%, 95%, 96%, 97%, 98%, 99%, or 100% identity to this consensus sequence. In some embodiments, the CDR-L1 comprises a sequence having 0, 1, 2, 3, 4, 5, or 6 substitutions from this consensus sequence.

[0195] In some embodiments, the CDR-L2 is defined by the formula X₁X₂SX₄X₅X₆X₇ (SEQ ID NO: 1206), where X₁ is A, D, or G; X₂ is A or T; X₄ is D, N, S, or T; X₅ is L or R; X₆ is A, E, or Q; and X₇ is A, N, S or T. In some embodiments, the CDR-L2 comprises a sequence having at least 80%, 81%, 82%, 83%, 84%, 85%, 86%, 87%, 88%, 89%, 90%, 91%, 92%, 93%, 94%, 95%, 96%, 97%, 98%, 99%, or 100% identity to this consensus sequence. In some embodiments, the CDR-L2 comprises a sequence having 0, 1, 2, 3, 4, 5, or 6 substitutions from this consensus sequence.

[0196] In some embodiments, the CDR-L3 is defined by the formula CQQX₄X₅X₆X₇X₈X₉X₁₀X₁₁ (SEQ ID NO: 1207), where X₄ is A, S, or Y; X₅ is D, H, I, or Y; X₆ is N, S, or T; X₇ is A, F, P, S, or T; X₈ is L or P; X₉ is L, S, T, V, W, or Y; X₁₀ is no amino acid, F, or T; and X₁₁ is no amino acid or F. In some embodiments, the CDR-L3 comprises a sequence having at least 80%, 81%, 82%, 83%, 84%, 85%, 86%, 87%, 88%, 89%, 90%, 91%, 92%, 93%, 94%, 95%, 96%, 97%, 98%, 99%, or 100% identity to this consensus sequence. In some embodiments, the CDR-L3 comprises a sequence having 0, 1, 2, 3, 4, 5, or 6 substitutions from this consensus sequence.

[0197] In some embodiments, the CDR-H1 is defined by the formula X₁X₂X₃X₄X₅X₆X₇X₈X₉X₁₀X₁₁X₁₂ (SEQ ID NO: 1208), where X₁ is F, G, N or Y; X₂ is I, R, S, T, or V; X₃ is F or L; X₄ is A, D, I, N, R, S, or T; X₅ is A, D, E, G, N, R, S, or T; X₆ is no amino acid H, S, or Y; X₇ is no amino acid, A, D, G, T, or V; X₈ is no amino acid D, F, I, or M; X₉ is H, N, Q, S, or Y; X₁₀ is no amino acid, A, E, F, G, H, L, S, or Y; X₁₁ is no amino acid, I, L, M, T, or V; and X₁₂ is no amino acid, H, or Y. In some embodiments, the CDR-H1 comprises a sequence having at least 80%, 81%, 82%, 83%, 84%, 85%, 86%, 87%, 88%, 89%, 90%, 91%, 92%, 93%, 94%, 95%, 96%, 97%, 98%, 99%, or 100% identity to this consensus sequence. In some embodiments, the CDR-H1 comprises a sequence having 0, 1, 2, 3, 4, 5, or 6 substitutions from this consensus sequence.

[0198] In some embodiments, the CDR-H2 is defined by the formula X₁X₂X₃X₄X₅X₆X₇X₈X₉X₁₀X₁₁X₁₂X₁₃X₁₄ (SEQ ID NO: 1209), where X₁ is A, G, or S; X₂ is A, G, I, M, R, S, T, V, or W; X₃ is no amino acid, F, I, M, or V; X₄ is D, I, N, S, or T; X₅ is A, K, P, S, or T; X₆ is D, G, H, I, M, N, R, S, T, or Y; X₇ is A, D, F, G, N, S, or T; X₈ is A, or G; X₉ is A, D, G, H, I, K, N, R, S, T, V, or Y; X₁₀ is A, E, N, P, S, or T; X₁₁ is A, D, G, H, I, K, L, N, Q, S, T, or Y; X₁₂ is F, N, or Y; X₁₃ is A or Y; and X₁₄ is no amino acid, A, or V. In some embodiments, the CDR-H2 comprises a sequence having at least 80%, 81%, 82%, 83%, 84%, 85%, 86%, 87%, 88%, 89%, 90%, 91%, 92%, 93%, 94%, 95%, 96%, 97%, 98%, 99%, or 100% identity to this consensus sequence. In some embodiments, the CDR-H2 comprises a sequence having 0, 1, 2, 3, 4, 5, or 6 substitutions from this consensus sequence.

[0199] In some embodiments, the CDR-H3 is defined by the formula X₁X₂X₃X₄X₅X₆X₇X₈X₉X₁₀X₁₁X₁₂X₁₃X₁₄X₁₅X₁₆X₁₇X₁₈X₁₉X₂₀X₂₁X₂₂X₂₃X₂₄X₂₅X₂₆X₂₇W (SEQ ID NO: 1210), where X₁ is no amino acid or C; X₂ is no amino acid, A, or C; X₃ is no amino acid, A, C, K, or V; X₄ is no amino acid, A, D, G, K, M, R, S, or W; X₅ is no amino acid, A, D, E, G, H, T, or V; X₆ is no amino acid, C, D, E, F, G, H, L, M, N, P, Q, R, S, T, V, or Y; X₇ is no amino acid, A, D, E, G, I, L, M, N, Q, R, S, V, or Y; X₈ is no amino acid, A, F, I, L, P, R, T, V, W, or Y; X₉ is no amino acid, D, E, or Y; X₁₀ is no amino acid, G, S, V, or Y; X₁₁ is no amino acid, E, G, I, or S; X₁₂ is no amino acid or G; X₁₃ is no amino acid, L, or T; X₁₄ is no amino acid, D, L, or T; X₁₅ is no amino acid, A, C, D, G, H, or P; X₁₆ is no amino acid, A, C, F, G, L, M, or Y; X₁₇ is no amino acid, A, C, D, E, G, K, N, R, S, T, or V; X₁₈ is no amino acid, A, C, D, E, G, I, L, N, P, R, S, T, V, W, or Y; X₁₉ is no amino acid, A, D, E, F, G, H, K, L, N, Q, R, S, T, W, or Y; X₂₀ is no amino acid, A, C, D, E, G, I, M, P, Q, S, T, V, W, or Y; X₂₁ is no amino acid, A, D, E, F, G, H, L, Q, S, V, W, or Y; X₂₂ is no amino acid, A, D, E, F, G, H, I, L, M, N, P, Q, S, T, W, or Y; X₂₃ is no amino acid, A, D, E, G, H, L, P, S, T, V, W, or Y; X₂₄ is no amino acid, A, D, E, F, G, I, L, Q, S, T, V, W, or Y; X₂₅ is no amino acid, A, F, I, L, M, S, V, or Y; X₂₆ is no amino acid, D, G, L, or V; and X₂₇ is I, L, N, P, V, or Y. In some embodiments, the CDR-H3 comprises a sequence having at least 80%, 81%, 82%, 83%, 84%, 85%, 86%, 87%, 88%, 89%, 90%, 91%, 92%, 93%, 94%, 95%, 96%, 97%, 98%, 99%, or 100% identity to this consensus sequence. In some embodiments, the CDR-H3 comprises a sequence having 0, 1, 2, 3, 4, 5, or 6 substitutions from this consensus sequence.

[0200] In some embodiments, the CDR-L1 is defined by the formula X₁X₂SX₄X₅X₆X₇X₈X₉X₁₀X₁₁X₁₂X₁₃X₁₄X₁₅X₁₆X₁₇ (SEQ ID NO: 1211), where X₁ is K, Q, or R; X₂ is A, S, or T; X₄ is E, H, Q, S, or T; X₅ is no amino acid or S; X₆ is no amino acid, L, or V; X₇ is no amino acid or L; X₈ is no amino acid, H, or Y; X₉ is no amino acid or S; X₁₀ is no amino acid or S; X₁₁ is D, E, G, N, R, S, or T; X₁₂ is G, I, N, or V; X₁₃ is D, G, K, N, R, S, T, or Y; X₁₄ is D, G, H, I, K, N, R, S, or T; X₁₅ is D, F, G, N, S, W, or Y; X₁₆ is L or V; and X₁₇ is A, D, G, H, or N. In some embodiments, the CDR-L1 comprises a sequence having at least 80%, 81%, 82%, 83%, 84%, 85%, 86%, 87%, 88%, 89%, 90%, 91%, 92%, 93%, 94%, 95%, 96%, 97%, 98%, 99%, or 100% identity to this consensus sequence. In some embodiments, the CDR-L1 comprises a sequence having 0, 1, 2, 3, 4, 5, or 6 substitutions from this consensus sequence.

[0201] In some embodiments, the CDR-L2 is defined by the formula X₁X₂X₃X₄X₅X₆X₇ (SEQ ID NO: 1212), where X₁ is A, D, E, G, H, L, Q, S, W, or Y; X₂ is A, G, T, or V; X₃ is S or T; X₄ is D, N, S, T, or Y; X₅ is L or R; X₆ is A, D, E, H, or Q; and X₇ is A, G, I, N, R, S, or T. In some embodiments, the CDR-L2 comprises a sequence having at least 80%, 81%, 82%, 83%, 84%, 85%, 86%, 87%, 88%, 89%, 90%, 91%, 92%, 93%, 94%, 95%, 96%, 97%, 98%, 99%, or 100% identity to this consensus sequence. In some embodiments, the CDR-L2 comprises a sequence having 0, 1, 2, 3, 4, 5, or 6 substitutions from this consensus sequence.

[0202] In some embodiments, the CDR-L3 is defined by the formula X₁X₂X₃X₄X₅X₆X₇X₈X₉X₁₀X₁ (SEQ ID NO: 1213), where X₁ is C or L; X₂ is L, M, Q, or S; X₃ is K, Q, or T; X₄ is A, D, G, N, S, T, or Y; X₅ is A, D, F, H, I, L, N, R, T, or Y; X₆ is A, D, E, G, H, I, N, Q, R, S, or T; X₇ is A, F, G, I, P, S, T, W, or Y; X₈ is L, P, or T; X₉ is A, F, I, L, M, P, S, T, V, W, or Y; X₁₀ is no amino acid, A, F, H, R, S, or T; and X₁₁ is no amino acid or F. In some embodiments, the CDR-L3 comprises a sequence having at least 80%, 81%, 82%, 83%, 84%, 85%, 86%, 87%, 88%, 89%, 90%, 91%, 92%, 93%, 94%, 95%, 96%, 97%, 98%, 99%, or 100% identity to this consensus sequence. In some embodiments, the CDR-L3 comprises a sequence having 0, 1, 2, 3, 4, 5, or 6 substitutions from this consensus sequence.

[0203] Depending on the embodiment, the biocompatible framework structures are based on protein scaffolds or skeletons other than immunoglobulin domains. In some such embodiments, those framework structures are based on fibronectin, ankyrin, lipocalin, neocarzinostain, cytochrome b, CPI zinc finger, PSTI, coiled coil, LACI-D1, Z domain and/or tendamistat domains.

[0204] There is also provided, in some embodiments, antigen-binding proteins with more than one binding site. In several embodiments, the binding sites are identical to one another while in some embodiments the binding sites are different from one another. For example, an antibody typically has two identical binding sites, while a “bispecific” or “bifunctional” antibody has two different binding sites. The two binding sites of a bispecific antigen-binding protein or antibody will bind to two different epitopes, which can reside on the same or different protein targets. In several embodiments, this is particularly advantageous, as a bispecific chimeric antigen receptor can impart to an engineered cell the ability to target multiple tumor markers. For example, CD70 and an additional tumor marker, such as CD123, CD19, Her2, mesothelin, Claudin 6, BCMA, EGFR, MICA, MICB, ULBP1, ULBP2, ULBP3, ULBP4, ULBP5, and ULBP6, among others, or any other marker disclosed herein or appreciated in the art as a tumor specific antigen or tumor associated antigen can be bound by a bispecific antibody.

[0205] As used herein, the term “chimeric antibody” shall be given its ordinary meaning, and shall also refer to an antibody that contains one or more regions from one antibody and one or more regions from one or more other antibodies. In some embodiments, one or more of the CDRs are derived from an anti-cancer antigen antibody (e.g., CD70, CD19, CD123, Her2, mesothelin, PD-L1, Claudin 6, BCMA, EGFR, etc.) antibody. In several embodiments, all of the CDRs are derived from an anti-cancer antigen antibody (such as an anti-CD70 antibody). In some embodiments, the CDRs from more than one anti-cancer antigen antibodies are mixed and matched in a chimeric antibody. For instance, a chimeric antibody may comprise a CDR1 from the light chain of a first anti-cancer antigen antibody, a CDR2 and a CDR3 from the light chain of a second anti-cancer antigen antibody, and the CDRs from the heavy chain from a third anti-cancer antigen antibody. Further, the framework regions of antigen-binding proteins disclosed herein may be derived from one of the same anti-cancer antigen (e.g., CD70, CD123, CD19, Her2, mesothelin, Claudin 6, BCMA, EGFR, etc.) antibodies, from one or more different antibodies, such as a human antibody, or from a humanized antibody. In one example of a chimeric antibody, a portion of the heavy and/or light chain is identical with, homologous to, or derived from an antibody from a particular species or belonging to a particular antibody class or subclass, while the remainder of the chain(s) is/are identical with, homologous to, or derived from an antibody or antibodies from another species or belonging to another antibody class or subclass. Also provided herein are fragments of such antibodies that exhibit the desired biological activity. In some embodiments, the CARs disclosed herein comprise an anti-CD70 binding domain. In some embodiments, the anti-CD70 binding domain is an scFv. In several embodiments, the CARs disclosed herein comprise an scFv as the binder for the tumor antigen. In several embodiments, the scFv is encoded by a polynucleotide comprising a sequence that has at least about 85%, about 90%, about 95%, or more, sequence identity to one or more of SEQ ID NOs: 36-120, 221-229, 1038-1111, 1112-1185. In several embodiments, the scFv comprises an amino acid sequences that has at least about 85%, about 90%, about 95%, or more, sequence identity to one or more of SEQ ID NOs: 230-312, 890-963, and/or 964-1037.

Natural Killer Group Domains that Bind Tumor Ligands

[0206] In several embodiments, engineered immune cells such as NK cells are leveraged for their ability to recognize and destroy tumor cells. For example, an engineered NK cell may include a CD70-directed chimeric antigen receptor or a nucleic acid encoding said chimeric antigen receptor (or a CAR directed against, for example, one or more of CD123, CD19, Her2, mesothelin, Claudin 6, BCMA, EGFR, etc.). NK cells express both inhibitory and activating receptors on the cell surface. Inhibitory receptors bind self-molecules expressed on the surface of healthy cells (thus preventing immune responses against “self” cells), while the activating receptors bind ligands expressed on abnormal cells, such as tumor cells. When the balance between inhibitory and activating receptor activation is in favor of activating receptors, NK cell activation occurs and target (e.g., tumor) cells are lysed.

[0207] Natural killer Group 2 member D (NKG2D) is an NK cell activating receptor that recognizes a variety of ligands expressed on cells. The surface expression of various NKG2D ligands is generally low in healthy cells but is upregulated upon, for example, malignant transformation. Non-limiting examples of ligands recognized by NKG2D include, but are not limited to, MICA, MICB, ULBP1, ULBP2, ULBP3, ULBP4, ULBP5, and ULBP6, as well as other molecules expressed on target cells that control the cytolytic or cytotoxic function of NK cells. In several embodiments, T cells are engineered to express an extracellular domain to binds to one or more tumor ligands and activate the T cell. For example, in several embodiments, T cells are engineered to express an NKG2D receptor as the binder/activation moiety. In several embodiments, engineered cells as disclosed herein are engineered to express another member of the NKG2 family, e.g., NKG2A, NKG2C, and/or NKG2E. Combinations of such receptors are engineered in some embodiments. Moreover, in several embodiments, other receptors are expressed, such as the Killer-cell immunoglobulin-like receptors (KIRs).

[0208] In several embodiments, cells are engineered to express a cytotoxic receptor complex comprising a full length NKG2D as an extracellular component to recognize ligands on the surface of tumor cells (e.g., liver cells). In one embodiment, full length NKG2D has the nucleic acid sequence of SEQ ID NO: 27. In several embodiments, the full length NKG2D, or functional fragment thereof is human NKG2D. Additional information about chimeric receptors for use in the presently disclosed methods and compositions can be found in PCT Patent Publication No. WO/2018/183385, which is incorporated in its entirety by reference herein.

[0209] In several embodiments, cells are engineered to express a cytotoxic receptor complex comprising a functional fragment of NKG2D as an extracellular component to recognize ligands on the surface of tumor cells or other diseased cells. In one embodiment, the functional fragment of NKG2D has the nucleic acid sequence of SEQ ID NO: 25. In several embodiments, the fragment of NKG2D has at least 70%, at least 75%, at least 80%, at least 85%, at least 90%, or at least 95% sequence identity with full-length wild-type NKG2D. In several embodiments, the fragment may have one or more additional mutations from SEQ ID NO: 25, but retains, or in some embodiments, has enhanced, ligand-binding function. In several embodiments, the functional fragment of NKG2D comprises the amino acid sequence of SEQ ID NO: 26. In several embodiments, the NKG2D fragment is provided as a dimer, trimer, or other concatemeric format, such embodiments providing enhanced ligand-binding activity. In several embodiments, the sequence encoding the NKG2D fragment is optionally fully or partially codon optimized. In one embodiment, a sequence encoding a codon optimized NKG2D fragment comprises the sequence of SEQ ID NO: 28. Advantageously, according to several embodiments, the functional fragment lacks its native transmembrane or intracellular domains but retains its ability to bind ligands of NKG2D as well as transduce activation signals upon ligand binding. A further advantage of such fragments is that expression of DAP10 to localize NKG2D to the cell membrane is not required. Thus, in several embodiments, the cytotoxic receptor complex encoded by the polypeptides disclosed herein does not comprise DAP10. In several embodiments, immune cells, such as NK or T cells (e.g., non-alloreactive T cells engineered according to embodiments disclosed herein), are engineered to express one or more chimeric receptors that target, for example CD70, CD19, CD123, Her2, mesothelin, Claudin 6, BCMA, EGFR, and an NKG2D ligand, such as MICA, MICB, ULBP1, ULBP2, ULBP3, ULBP4, ULBP5, and/or ULBP6. Such cells, in several embodiments, also co-express mbIL15.

[0210] In several embodiments, the cytotoxic receptor complexes are configured to dimerize. Dimerization may comprise homodimers or heterodimers, depending on the embodiment. In several embodiments, dimerization results in improved ligand recognition by the cytotoxic receptor complexes (and hence the NK cells expressing the receptor), resulting in a reduction in (or lack) of adverse toxic effects. In several embodiments, the cytotoxic receptor complexes employ internal dimers, or repeats of one or more component subunits. For example, in several embodiments, the cytotoxic receptor complexes may optionally comprise a first NKG2D extracellular domain coupled to a second NKG2D extracellular domain, and a transmembrane/signaling region (or a separate transmembrane region along with a separate signaling region).

[0211] In several embodiments, the various domains/subdomains are separated by a linker such as, a GS3 linker (SEQ ID NOs: 15 and 16, nucleotide and protein, respectively) is used (or a GSn linker). Other linkers used according to various embodiments disclosed herein include, but are not limited to those encoded by SEQ ID NOs: 17, 19, 21 or 23. In several embodiments, other linkers comprise the peptide sequence of one of SEQ ID NOs: 18, 20, 22, 24. This provides the potential to separate the various component parts of the receptor complex along the polynucleotide, which can enhance expression, stability, and/or functionality of the receptor complex.

### Cytotoxic Signaling Complex

[0212] Some embodiments of the compositions and methods described herein relate to a chimeric receptor, such as a chimeric antigen receptor (e.g., a CAR directed to CD70) or a chimeric receptor directed against an NKG2D ligand, such as MICA, MICB, ULBP1, ULBP2, ULBP3, ULBP4, ULBP5, and/or ULBP6) that includes a cytotoxic signaling complex. As disclosed herein, according to several embodiments, the provided cytotoxic receptor complexes comprise one or more transmembrane and/or intracellular domains that initiate cytotoxic signaling cascades upon the extracellular domain(s) binding to ligands on the surface of target cells.

[0213] In several embodiments, the cytotoxic signaling complex comprises at least one transmembrane domain, at least one co-stimulatory domain, and/or at least one signaling domain. In some embodiments, more than one component part makes up a given domain—e.g., a co-stimulatory domain may comprise two subdomains. Moreover, in some embodiments, a domain may serve multiple functions, for example, a transmembrane domain may also serve to provide signaling function.

### Transmembrane Domains

[0214] Some embodiments of the compositions and methods described herein relate to chimeric receptors (e.g., tumor antigen-directed CARs and/or ligand-directed chimeric receptors) that comprise a transmembrane domain. Some embodiments include a transmembrane domain from NKG2D or another transmembrane protein. In several embodiments in which a transmembrane domain is employed, the portion of the transmembrane protein employed retains at least a portion of its normal transmembrane domain.

[0215] In several embodiments, however, the transmembrane domain comprises at least a portion of CD8, a transmembrane glycoprotein normally expressed on both T cells and NK cells. In several embodiments, the transmembrane domain comprises CD8a. In several embodiments, the transmembrane domain is referred to as a “hinge”. In several embodiments, the “hinge” of CD8a has the nucleic acid sequence of SEQ ID NO: 1. In several embodiments, the CD8a hinge is truncated or modified and has at least 70%, at least 75%, at least 80%, at least 85%, at least 90%, at least 95% sequence identity with the CD8a having the sequence of SEQ ID NO: 1. In several embodiments, the “hinge” of CD8a comprises the amino acid sequence of SEQ ID NO: 2. In several embodiments, the CD8a can be truncated or modified, such that it has at least 70%, at least 75%, at least 80%, at least 85%, at least 90%, at least 95% sequence identity with the sequence of SEQ ID NO: 2.

[0216] In several embodiments, the transmembrane domain comprises a CD8a transmembrane region. In several embodiments, the CD8a transmembrane domain has the nucleic acid sequence of SEQ ID NO: 3. In several embodiments, the CD8a hinge is truncated or modified and has at least 70%, at least 75%, at least 80%, at least 85%, at least 90%, at least 95% sequence identity with the CD8a having the sequence of SEQ ID NO: 3. In several embodiments, the CD8a transmembrane domain comprises the amino acid sequence of SEQ ID NO: 4. In several embodiments, the CD8a hinge is truncated or modified and has at least 70%, at least 75%, at least 80%, at least 85%, at least 90%, at least 95% sequence identity with the CD8a having the sequence of SEQ ID NO: 4.

[0217] Taken together in several embodiments, the CD8 hinge/transmembrane complex is encoded by the nucleic acid sequence of SEQ ID NO: 13. In several embodiments, the CD8 hinge/transmembrane complex is truncated or modified and has at least 70%, at least 75%, at least 80%, at least 85%, at least 90%, at least 95% sequence identity with the CD8 hinge/transmembrane complex having the sequence of SEQ ID NO: 13. In several embodiments, the CD8 hinge/transmembrane complex comprises the amino acid sequence of SEQ ID NO: 14. In several embodiments, the CD8 hinge/transmembrane complex hinge is truncated or modified and has at least 70%, at least 75%, at least 80%, at least 85%, at least 90%, at least 95% sequence identity with the CD8 hinge/transmembrane complex having the sequence of SEQ ID NO: 14.

[0218] In some embodiments, the transmembrane domain comprises a CD28 transmembrane domain or a fragment thereof. In several embodiments, the CD28 transmembrane domain comprises the amino acid sequence of SEQ ID NO: 30. In several embodiments, the CD28 transmembrane domain complex hinge is truncated or modified and has at least 70%, at least 75%, at least 80%, at least 85%, at least 90%, at least 95% sequence identity with the CD28 transmembrane domain having the sequence of SEQ ID NO: 30.

[0219] Co-stimulatory Domains

[0220] Some embodiments of the compositions and methods described herein relate to chimeric receptors (e.g., tumor antigen-directed CARs and/or tumor ligand-directed chimeric receptors) that comprise a co-stimulatory domain. In addition, the various the transmembrane domains and signaling domain (and the combination transmembrane/signaling domains), additional co-activating molecules can be provided, in several embodiments. These can be certain molecules that, for example, further enhance activity of the immune cells. Cytokines may be used in some embodiments. For example, certain interleukins, such as IL-2 and/or IL-15 as non-limiting examples, are used. In some embodiments, the immune cells for therapy are engineered to express such molecules as a secreted form. In additional embodiments, such co-stimulatory domains are engineered to be membrane bound, acting as autocrine stimulatory molecules (or even as paracrine stimulators to neighboring cells).

[0221] In several embodiments, the NK cells disclosed herein are engineered to express interleukin 15 (IL15, IL-15). In some embodiments, the IL15 is expressed from a separate cassette on the construct comprising any one of the CARs disclosed herein. In some embodiments, the IL15 is expressed in the same cassette as any one of the CARs disclosed herein, optionally separated by a cleavage site, for example, a proteolytic cleavage site or a T2A, P2A, E2A, or F2A self-cleaving peptide cleavage site. In some embodiments, the IL15 is a membrane-bound IL15 (mbIL15). In some embodiments, the mbIL15 comprises a native IL15 sequence, such as a human native IL15 sequence, and at least one transmembrane domain. In some embodiments, the native IL15 sequence is encoded by a sequence having at least 85%, at least 90%, at least 95% sequence identity to SEQ ID NO: 11. In some embodiments, the native IL15 sequence comprise a peptide sequence having at least 85%, at least 90%, at least 95% sequence identity to SEQ ID NO: 12. In some embodiments, the at least one transmembrane domain comprises a CD8 transmembrane domain. In some embodiments, the mbIL15 may comprise additional components, such as a leader sequence and/or a hinge sequence. In some embodiments, the leader sequence is a CD8 leader sequence. In some embodiments, the hinge sequence is a CD8 hinge sequence.

[0222] In some embodiments, the tumor antigen-directed CARs and/or tumor ligand-directed chimeric receptors are encoded by a polynucleotide that encodes for one or more cytosolic protease cleavage sites. Such sites are recognized and cleaved by a cytosolic protease, which can result in separation (and separate expression) of the various component parts of the receptor encoded by the polynucleotide. In some embodiments, the tumor antigen-directed CARs and/or tumor ligand-directed chimeric receptor are encoded by a polynucleotide that encodes for one or more self-cleaving peptides, for example a T2A cleavage site, a P2A cleavage site, an E2A cleavage site, and/or an F2A cleavage site. As a result, depending on the embodiment, the various constituent parts of an engineered cytotoxic receptor complex can be delivered to an NK cell or T cell in a single vector or by multiple vectors. Thus, as shown schematically, in the Figures, a construct can be encoded by a single polynucleotide, but also include a cleavage site, such that downstream elements of the constructs are expressed by the cells as a separate protein (as is the case in some embodiments with IL-15). In several embodiments, a T2A cleavage site is used. In several embodiments, a T2A cleavage site has the nucleic acid sequence of SEQ ID NO: 9. In several embodiments, T2A cleavage site can be truncated or modified, such that it has at least 70%, at least 75%, at least 80%, at least 85%, at least 90%, at least 95% sequence identity with the sequence of SEQ ID NO: 9. In several embodiments, the T2A cleavage site comprises the amino acid sequence of SEQ ID NO: 10. In several embodiments, the T2A cleavage site is truncated or modified and has at least 70%, at least 75%, at least 80%, at least 85%, at least 90%, at least 95% sequence identity with the T2A cleavage site having the sequence of SEQ ID NO: 10.

[0223] In several embodiments, NK cells are engineered to express membrane-bound interleukin 15 (mbIL15). In such embodiments, mbIL15 expression on the NK enhances the cytotoxic effects of the engineered NK cell by enhancing the proliferation and/or longevity of the NK cells. In several embodiments, the mbIL15 is encoded by the same polynucleotide as the CAR. In some embodiments, mbIL15 is encoded by a polynucleotide comprising the sequence of SEQ ID NO: 11 and a sequence that encodes for a transmembrane domain. In some embodiments, mbIL15 comprises the amino acid sequence of SEQ ID NO: 12 functionally coupled to an amino acid sequence of a transmembrane domain. In several embodiments, mbIL15 has the nucleic acid sequence of SEQ ID NO: 1188. In several embodiments, mbIL15 can be truncated or modified, such that it has at least 70%, at least 75%, at least 80%, at least 85%, at least 90%, at least 95% sequence identity with the sequence of SEQ ID NO: 1188. In several embodiments, the mbIL15 comprises the amino acid sequence of SEQ ID NO: 1189. In several embodiments, the mbIL15 is truncated or modified and has at least 70%, at least 75%, at least 80%, at least 85%, at least 90%, at least 95% sequence identity with the mbIL15 having the sequence of SEQ ID NO: 1189. Membrane-bound IL15 sequences are explored in PCT publications WO 2018/183385 and WO 2020/056045, each of which is hereby expressly incorporated by reference in its entirety and pertaining to membrane-bound IL15 sequences.

### Signaling Domains

[0224] Some embodiments of the compositions and methods described herein relate to a chimeric receptor (e.g., tumor antigen-directed CARs and/or tumor ligand-directed chimeric receptors) that includes a signaling domain. For example, immune cells engineered according to several embodiments disclosed herein may comprise at least one subunit of the CD3 T cell receptor complex (or a fragment thereof). In several embodiments, the signaling domain comprises the CD3zeta subunit. In several embodiments, the CD3zeta is encoded by the nucleic acid sequence of SEQ ID NO: 7. In several embodiments, the CD3zeta can be truncated or modified, such that it has at least 70%, at least 75%, at least 80%, at least 85%, at least 90%, at least 95% sequence identity with the CD3zeta having the sequence of SEQ ID NO: 7. In several embodiments, the CD3zeta domain comprises the amino acid sequence of SEQ ID NO: 8. In several embodiments, the CD3zeta domain is truncated or modified and has at least 70%, at least 75%, at least 80%, at least 85%, at least 90%, at least 95% sequence identity with the CD3zeta domain having the sequence of SEQ ID NO: 8.

[0225] In several embodiments, unexpectedly enhanced signaling is achieved through the use of multiple signaling domains whose activities act synergistically. For example, in several embodiments, the signaling domain further comprises an OX40 domain. In several embodiments, the OX40 domain is an intracellular signaling domain. In several embodiments, the OX40 intracellular signaling domain has the nucleic acid sequence of SEQ ID NO: 5. In several embodiments, the OX40 intracellular signaling domain can be truncated or modified, such that it has at least 70%, at least 75%, at least 80%, at least 85%, at least 90%, at least 95% sequence identity with the OX40 having the sequence of SEQ ID NO: 5. In several embodiments, the OX40 intracellular signaling domain comprises the amino acid sequence of SEQ ID NO: 6. In several embodiments, the OX40 intracellular signaling domain is truncated or modified and has at least 70%, at least 75%, at least 80%, at least 85%, at least 90%, at least 95% sequence identity with the OX40 intracellular signaling domain having the sequence of SEQ ID NO: 6. In several embodiments, OX40 is used as the sole transmembrane/signaling domain in the construct, however, in several embodiments, OX40 can be used with one or more other domains. For example, combinations of OX40 and CD3zeta are used in some embodiments. By way of further example, combinations of CD28, OX40, 4-1BB, and/or CD3zeta are used in some embodiments.

[0226] In several embodiments, the signaling domain comprises a 4-1BB domain. In several embodiments, the 4-1BB domain is an intracellular signaling domain. In several embodiments, the 4-1BB intracellular signaling domain comprises the amino acid sequence of SEQ ID NO: 29. In several embodiments, the 4-1BB intracellular signaling domain is truncated or modified and has at least 70%, at least 75%, at least 80%, at least 85%, at least 90%, at least 95% sequence identity with the 4-1BB intracellular signaling domain having the sequence of SEQ ID NO: 29. In several embodiments, 4-1BB is used as the sole transmembrane/signaling domain in the construct, however, in several embodiments, 4-1BB can be used with one or more other domains. For example, combinations of 4-1BB and CD3zeta are used in some embodiments. By way of further example, combinations of CD28, OX40, 4-1BB, and/or CD3zeta are used in some embodiments.

[0227] In several embodiments, the signaling domain comprises a CD28 domain. In several embodiments the CD28 domain is an intracellular signaling domain. In several embodiments, the CD28 intracellular signaling domain comprises the amino acid sequence of SEQ ID NO: 31. In several embodiments, the CD28 intracellular signaling domain is truncated or modified and has at least 70%, at least 75%, at least 80%, at least 85%, at least 90%, at least 95% sequence identity with the CD28 intracellular signaling domain having the sequence of SEQ ID NO: 31. In several embodiments, CD28 is used as the sole transmembrane/signaling domain in the construct, however, in several embodiments, CD28 can be used with one or more other domains. For example, combinations of CD28 and CD3zeta are used in some embodiments. By way of further example, combinations of CD28, OX40, 4-1BB, and/or CD3zeta are used in some embodiments.

### Cytotoxic Receptor Complex Constructs

[0228] Some embodiments of the compositions and methods described herein relate to chimeric antigen receptors, such as a CD19-directed chimeric receptor, as well as chimeric receptors, such as an activating chimeric receptor (ACR) that targets ligands of NKG2D. The expression of these cytotoxic receptor complexes in immune cells, such as genetically modified non-alloreactive T cells and/or NK cells, allows the targeting and destruction of particular target cells, such as cancerous cells. Non-limiting examples of such cytotoxic receptor complexes are discussed in more detail below.

### Chimeric Antigen Receptor Cytotoxic Receptor Complex Constructs

[0229] In several embodiments, there are provided for herein a variety of cytotoxic receptor complexes (also referred to as cytotoxic receptors) are provided for herein with the general structure of a chimeric antigen receptor. FIGS. 1-7 depict non-limiting schematics of constructs that include a tumor binding moiety that binds to tumor antigens or tumor-associated antigens expressed on the surface of cancer cells and activates the engineered cell expressing the chimeric antigen receptor. FIG. 7 shows a schematic of a chimeric receptor complex, with an NKG2D activating chimeric receptor as a non-limiting example (see NKG2D ACRa and ACRb). FIG. 6 shows a schematic of a CD70 directed CAR, as well as a bispecific CD70 CAR/chimeric receptor complex, and two non-limiting constructs, NK71 and NK72, which target CD70.

[0230] As shown in the figures, several embodiments of the CAR include an anti-tumor binder, a CD8a hinge domain, an Ig4 SH domain (or hinge), a CD8a transmembrane domain, a CD28 transmembrane domain, an OX40 domain, a 4-1BB domain, a CD28 domain, a CD3ζ ITAM domain or subdomain, a CD3zeta domain, an NKp80 domain, a CD16 IC domain, a 2A cleavage site, and/or a membrane-bound IL-15 domain (though, as above, in several embodiments soluble IL-15 is used). In several embodiments, the binding and activation functions are engineered to be performed by separate domains. Several embodiments relate to complexes with more than one tumor binder moiety or other binder/activation moiety. In some embodiments, the binder/activation moiety targets other markers besides CD70, such as a cancer target described herein, for example, CD19, CD123, CLDN6, BCMA, HER2, Mesothelin, PD-L1, or EGFR. In several embodiments, a construct is provided that targets NKG2D ligands on tumor cells, which can be used in conjunction with the CARs disclosed herein. In several embodiments, the general structure of the chimeric antigen receptor construct includes a hinge and/or transmembrane domain. These may, in some embodiments, be fulfilled by a single domain, or a plurality of subdomains may be used, in several embodiments. The receptor complex further comprises a signaling domain, which transduces signals after binding of the homing moiety to the target cell, ultimately leading to the cytotoxic effects on the target cell. In several embodiments, the complex further comprises a co-stimulatory domain, which operates, synergistically, in several embodiments, to enhance the function of the signaling domain. Expression of these complexes in immune cells, such as NK cells and/or T cells, allows the targeting and destruction of particular target cells, such as cancerous cells that express a given tumor marker. Some such receptor complexes comprise an extracellular domain comprising an anti-CD70 moiety, or CD70-binding moiety, that binds CD70 on the surface of target cells and activates the engineered cell. The CD3zeta ITAM subdomain may act in concert as a signaling domain. The IL-15 domain, e.g., mbIL-15 domain, may act as a co-stimulatory domain. The IL-15 domain, e.g. mbIL-15 domain, may render immune cells (e.g., NK or T cells) expressing it particularly efficacious against target tumor cells. It shall be appreciated that the IL-15 domain, such as an mbIL-15 domain, can, in accordance with several embodiments, be encoded on a separate construct. Additionally, each of the components may be encoded in one or more separate constructs.

[0231] Disclosed herein in some embodiments are anti-CD70 binding domains. In some embodiments, the anti-CD70 binding domains are scFvs. These anti-CD70 binding domains are specific for and/or preferentially bind to CD70. The anti-CD70 binding domains disclosed herein may be incorporated into any one of the chimeric antigen receptor constructs disclosed herein. The anti-CD70 binding domains disclosed herein may furthermore be expressed by a cell, either separately or within an anti-CD70 CAR.

[0232] In some embodiments, the anti-CD70 binding domain comprises a polynucleotide sequence that is at least 70%, 75%, 80%, 85%, 90%, 91%, 92%, 93%, 94%, 95%, 96%, 97%, 98%, 99%, or more, or a range defined by any two of the aforementioned percentages, identical to the sequence of either SEQ ID NO: 36 and/or SEQ ID NO: 37.

[0233] In some embodiments, the anti-CD70 binding domain comprises a heavy chain variable region and a light chain variable region. In some embodiments, the heavy chain variable region comprises a CDR-H1, CDR-H2, and CDR-H3 and the light chain variable region comprises a CDR-L1, CDR-L2, and CDR-L3. In some embodiments, the CDR-H1 comprises a sequence having at least 75%, 80%, 85%, 90%, 95%, 99%, or 100% sequence identity to a sequence selected from SEQ ID NOs: 428-501; the CDR-H2 comprises a sequence having at least 75%, 80%, 85%, 90%, 95%, 99%, or 100% sequence identity to a sequence selected from SEQ ID NOs: 502-575; the CDR-H3 comprises a sequence having at least 75%, 80%, 85%, 90%, 95%, 99%, or 100% sequence identity to a sequence selected from SEQ ID NOs: 576-649; the CDR-L1 comprises a sequence having at least 75%, 80%, 85%, 90%, 95%, 99%, or 100% sequence identity to a sequence selected from SEQ ID NOs: 668-741; the CDR-L2 comprises a sequence having at least 75%, 80%, 85%, 90%, 95%, 99%, or 100% sequence identity to a sequence selected from SEQ ID NOs: 742-815; and the CDR-L3 comprises a sequence having at least 75%, 80%, 85%, 90%, 95%, 99%, or 100% sequence identity to a sequence selected from SEQ ID NOs: 816-889.

[0234] In some embodiments of the anti-CD70 binding domains, the heavy chain variable region comprises an amino acid sequence having at least 75%, 80%, 85%, 90%, 95%, 99%, or 100% sequence identity to any sequence selected from SEQ ID NOs: 890-963. In some embodiments, the light chain variable region comprises an amino acid sequence having at least 75%, 80%, 85%, 90%, 95%, 99%, or 100% sequence identity to any sequence selected from SEQ ID NOs: 964-1037.

[0235] In some embodiments of the anti-CD70 binding domains: 1) the heavy chain variable region comprises the CDR-H1, CDR-H2, CDR-H3 within SEQ ID NO: 890 and the light chain variable region comprises the CDR-L1, CDR-L2, CDR-L3 within SEQ ID NO: 964; 2) the heavy chain variable region comprises the CDR-H1, CDR-H2, CDR-H3 within SEQ ID NO: 891 and the light chain variable region comprises the CDR-L1, CDR-L2, CDR-L3 within SEQ ID NO: 965; 3) the heavy chain variable region comprises the CDR-H1, CDR-H2, CDR-H3 within SEQ ID NO: 892 and the light chain variable region comprises the CDR-L1, CDR-L2, CDR-L3 within SEQ ID NO: 966; 4) the heavy chain variable region comprises the CDR-H1, CDR-H2, CDR-H3 within SEQ ID NO: 893 and the light chain variable region comprises the CDR-L1, CDR-L2,
[0236] CDR-L3 within SEQ ID NO: 967; 5) the heavy chain variable region comprises the CDR-H1, CDR-H2, CDR-H3 within SEQ ID NO: 894 and the light chain variable region comprises the CDR-L1, CDR-L2, CDR-L3 within SEQ ID NO: 968; 6) the heavy chain variable region comprises the CDR-H1, CDR-H2, CDR-H3 within SEQ ID NO: 895 and the light chain variable region comprises the CDR-L1, CDR-L2, CDR-L3 within SEQ ID NO: 969; 7) the heavy chain variable region comprises the CDR-H1, CDR-H2, CDR-H3 within SEQ ID NO: 896 and the light chain variable region comprises the CDR-L1, CDR-L2, CDR-L3 within SEQ ID NO: 970; 8) the heavy chain variable region comprises the CDR-H1, CDR-H2, CDR-H3 within SEQ ID NO: 897 and the light chain variable region comprises the CDR-L1, CDR-L2, CDR-L3 within SEQ ID NO: 971; 9) the heavy chain variable region comprises the CDR-H1, CDR-H2, CDR-H3 within SEQ ID NO: 898 and the light chain variable region comprises the CDR-L1, CDR-L2, CDR-L3 within SEQ ID NO: 972; 10) the heavy chain variable region comprises the CDR-H1, CDR-H2, CDR-H3 within SEQ ID NO: 899 and the light chain variable region comprises the CDR-L1, CDR-L2, CDR-L3 within SEQ ID NO: 973; 11) the heavy chain variable region comprises the CDR-H1, CDR-H2, CDR-H3 within SEQ ID NO: 900 and the light chain variable region comprises the CDR-L1, CDR-L2, CDR-L3 within SEQ ID NO: 974; 12) the heavy chain variable region comprises the CDR-H1, CDR-H2, CDR-H3 within SEQ ID NO: 901 and the light chain variable region comprises the CDR-L1, CDR-L2, CDR-L3 within SEQ ID NO: 975; 13) the heavy chain variable region comprises the CDR-H1, CDR-H2, CDR-H3 within SEQ ID NO: 902 and the light chain variable region comprises the CDR-L1, CDR-L2, CDR-L3 within SEQ ID NO: 976; 14) the heavy chain variable region comprises the CDR-H1, CDR-H2, CDR-H3 within SEQ ID NO: 903 and the light chain variable region comprises the CDR-L1, CDR-L2, CDR-L3 within SEQ ID NO: 977; 15) the heavy chain variable region comprises the CDR-H1, CDR-H2, CDR-H3 within SEQ ID NO: 904 and the light chain variable region comprises the CDR-L1, CDR-L2, CDR-L3 within SEQ ID NO: 978; 16) the heavy chain variable region comprises the CDR-H1, CDR-H2, CDR-H3 within SEQ ID NO: 905 and the light chain variable region comprises the CDR-L1, CDR-L2, CDR-L3 within SEQ ID NO: 979; 17) the heavy chain variable region comprises the CDR-H1, CDR-H2, CDR-H3 within SEQ ID NO: 906 and the light chain variable region comprises the CDR-L1, CDR-L2, CDR-L3 within SEQ ID NO: 980; 18) the heavy chain variable region comprises the CDR-H1, CDR-H2, CDR-H3 within SEQ ID NO: 907 and the light chain variable region comprises the CDR-L1, CDR-L2, CDR-L3 within SEQ ID NO: 981; 19) the heavy chain variable region comprises the CDR-H1, CDR-H2, CDR-H3 within SEQ ID NO: 908 and the light chain variable region comprises the CDR-L1, CDR-L2, CDR-L3 within SEQ ID NO: 982; 20) the heavy chain variable region comprises the CDR-H1, CDR-H2, CDR-H3 within SEQ ID NO: 909 and the light chain variable region comprises the CDR-L1, CDR-L2, CDR-L3 within SEQ ID NO: 983; 21) the heavy chain variable region comprises the CDR-H1, CDR-H2, CDR-H3 within SEQ ID NO: 910 and the light chain variable region comprises the CDR-L1, CDR-L2, CDR-L3 within SEQ ID NO: 984; 22) the heavy chain variable region comprises the CDR-H1, CDR-H2, CDR-H3 within SEQ ID NO: 911 and the light chain variable region comprises the CDR-L1, CDR-L2, CDR-L3 within SEQ ID NO: 985; 23) the heavy chain variable region comprises the CDR-H1, CDR-H2, CDR-H3 within SEQ ID NO: 912 and the light chain variable region comprises the CDR-L1, CDR-L2, CDR-L3 within SEQ ID NO: 986; 24) the heavy chain variable region comprises the CDR-H1, CDR-H2, CDR-H3 within SEQ ID NO: 913 and the light chain variable region comprises the CDR-L1, CDR-L2, CDR-L3 within SEQ ID NO: 987; 25) the heavy chain variable region comprises the CDR-H1, CDR-H2, CDR-H3 within SEQ ID NO: 914 and the light chain variable region comprises the CDR-L1, CDR-L2, CDR-L3 within SEQ ID NO: 988; 26) the heavy chain variable region comprises the CDR-H1, CDR-H2, CDR-H3 within SEQ ID NO: 915 and the light chain variable region comprises the CDR-L1, CDR-L2, CDR-L3 within SEQ ID NO: 989; 27) the heavy chain variable region comprises the CDR-H1, CDR-H2, CDR-H3 within SEQ ID NO: 916 and the light chain variable region comprises the CDR-L1, CDR-L2, CDR-L3 within SEQ ID NO: 990; 28) the heavy chain variable region comprises the CDR-H1, CDR-H2, CDR-H3 within SEQ ID NO: 917 and the light chain variable region comprises the CDR-L1, CDR-L2, CDR-L3 within SEQ ID NO: 991; 29) the heavy chain variable region comprises the CDR-H1, CDR-H2, CDR-H3 within SEQ ID NO: 918 and the light chain variable region comprises the CDR-L1, CDR-L2, CDR-L3 within SEQ ID NO: 992; 30) the heavy chain variable region comprises the CDR-H1, CDR-H2, CDR-H3 within SEQ ID NO: 919 and the light chain variable region comprises the CDR-L1, CDR-L2, CDR-L3 within SEQ ID NO: 993; 31) the heavy chain variable region comprises the CDR-H1, CDR-H2, CDR-H3 within SEQ ID NO: 920 and the light chain variable region comprises the CDR-L1, CDR-L2, CDR-L3 within SEQ ID NO: 994; 32) the heavy chain variable region comprises the CDR-H1, CDR-H2, CDR-H3 within SEQ ID NO: 921 and the light chain variable region comprises the CDR-L1, CDR-L2, CDR-L3 within SEQ ID NO: 995; 33) the heavy chain variable region comprises the CDR-H1, CDR-H2, CDR-H3 within SEQ ID NO: 922 and the light chain variable region comprises the CDR-L1, CDR-L2, CDR-L3 within SEQ ID NO: 996; 34) the heavy chain variable region comprises the CDR-H1, CDR-H2, CDR-H3 within SEQ ID NO: 923 and the light chain variable region comprises the CDR-L1, CDR-L2, CDR-L3 within SEQ ID NO: 997; 35) the heavy chain variable region comprises the CDR-H1, CDR-H2, CDR-H3 within SEQ ID NO: 924 and the light chain variable region comprises the CDR-L1, CDR-L2, CDR-L3 within SEQ ID NO: 998; 36) the heavy chain variable region comprises the CDR-H1, CDR-H2, CDR-H3 within SEQ ID NO: 925 and the light chain variable region comprises the CDR-L1, CDR-L2, CDR-L3 within SEQ ID NO: 999; 37) the heavy chain variable region comprises the CDR-H1, CDR-H2, CDR-H3 within SEQ ID NO: 926 and the light chain variable region comprises the CDR-L1, CDR-L2, CDR-L3 within SEQ ID NO: 1000; 38) the heavy chain variable region comprises the CDR-H1, CDR-H2, CDR-H3 within SEQ ID NO: 927 and the light chain variable region comprises the CDR-L1, CDR-L2, CDR-L3 within SEQ ID NO: 1001; 39) the heavy chain variable region comprises the CDR-H1, CDR-H2, CDR-H3 within SEQ ID NO: 928 and the light chain variable region comprises the CDR-L1, CDR-L2, CDR-L3 within SEQ ID NO: 1002; 40) the heavy chain variable region comprises the CDR-H1, CDR-H2, CDR-H3 within SEQ ID NO: 929 and the light chain variable region comprises the CDR-L1, CDR-L2, CDR-L3 within SEQ ID NO: 1003; 41) the heavy chain variable region comprises the CDR-H1, CDR-H2, CDR-H3 within SEQ ID NO: 930 and the light chain variable region comprises the CDR-L1, CDR-L2, CDR-L3 within SEQ ID NO: 1004; 42) the heavy chain variable region comprises the CDR-H1, CDR-H2, CDR-H3 within SEQ ID NO: 931 and the light chain variable region comprises the CDR-L1, CDR-L2, CDR-L3 within SEQ ID NO: 1005; 43) the heavy chain variable region comprises the CDR-H1, CDR-H2, CDR-H3 within SEQ ID NO: 932 and the light chain variable region comprises the CDR-L1, CDR-L2, CDR-L3 within SEQ ID NO: 1006; 44) the heavy chain variable region comprises the CDR-H1, CDR-H2, CDR-H3 within SEQ ID NO: 933 and the light chain variable region comprises the CDR-L1, CDR-L2, CDR-L3 within SEQ ID NO: 1007; 45) the heavy chain variable region comprises the CDR-H1, CDR-H2, CDR-H3 within SEQ ID NO: 934 and the light chain variable region comprises the CDR-L1, CDR-L2, CDR-L3 within SEQ ID NO: 1008; 46) the heavy chain variable region comprises the CDR-H1, CDR-H2, CDR-H3 within SEQ ID NO: 935 and the light chain variable region comprises the CDR-L1, CDR-L2, CDR-L3 within SEQ ID NO: 1009; 47) the heavy chain variable region comprises the CDR-H1, CDR-H2, CDR-H3 within SEQ ID NO: 936 and the light chain variable region comprises the CDR-L1, CDR-L2, CDR-L3 within SEQ ID NO: 1010; 48) the heavy chain variable region comprises the CDR-H1, CDR-H2, CDR-H3 within SEQ ID NO: 937 and the light chain variable region comprises the CDR-L1, CDR-L2, CDR-L3 within SEQ ID NO: 1011; 49) the heavy chain variable region comprises the CDR-H1, CDR-H2, CDR-H3 within SEQ ID NO: 938 and the light chain variable region comprises the CDR-L1, CDR-L2, CDR-L3 within SEQ ID NO: 1012; 50) the heavy chain variable region comprises the CDR-H1, CDR-H2, CDR-H3 within SEQ ID NO: 939 and the light chain variable region comprises the CDR-L1, CDR-L2, CDR-L3 within SEQ ID NO: 1013; 51) the heavy chain variable region comprises the CDR-H1, CDR-H2, CDR-H3 within SEQ ID NO: 940 and the light chain variable region comprises the CDR-L1, CDR-L2, CDR-L3 within SEQ ID NO: 1014; 52) the heavy chain variable region comprises the CDR-H1, CDR-H2, CDR-H3 within SEQ ID NO: 941 and the light chain variable region comprises the CDR-L1, CDR-L2, CDR-L3 within SEQ ID NO: 1015; 53) the heavy chain variable region comprises the CDR-H1, CDR-H2, CDR-H3 within SEQ ID NO: 942 and the light chain variable region comprises the CDR-L1, CDR-L2, CDR-L3 within SEQ ID NO: 1016; 54) the heavy chain variable region comprises the CDR-H1, CDR-H2, CDR-H3 within SEQ ID NO: 943 and the light chain variable region comprises the CDR-L1, CDR-L2, CDR-L3 within SEQ ID NO: 1017; 55) the heavy chain variable region comprises the CDR-H1, CDR-H2, CDR-H3 within SEQ ID NO: 944 and the light chain variable region comprises the CDR-L1, CDR-L2, CDR-L3 within SEQ ID NO: 1018; 56) the heavy chain variable region comprises the CDR-H1, CDR-H2, CDR-H3 within SEQ ID NO: 945 and the light chain variable region comprises the CDR-L1, CDR-L2, CDR-L3 within SEQ ID NO: 1019; 57) the heavy chain variable region comprises the CDR-H1, CDR-H2, CDR-H3 within SEQ ID NO: 946 and the light chain variable region comprises the CDR-L1, CDR-L2, CDR-L3 within SEQ ID NO: 1020; 58) the heavy chain variable region comprises the CDR-H1, CDR-H2, CDR-H3 within SEQ ID NO: 947 and the light chain variable region comprises the CDR-L1, CDR-L2, CDR-L3 within SEQ ID NO: 1021; 59) the heavy chain variable region comprises the CDR-H1, CDR-H2, CDR-H3 within SEQ ID NO: 948 and the light chain variable region comprises the CDR-L1, CDR-L2, CDR-L3 within SEQ ID NO: 1022; 60) the heavy chain variable region comprises the CDR-H1, CDR-H2, CDR-H3 within SEQ ID NO: 949 and the light chain variable region comprises the CDR-L1, CDR-L2, CDR-L3 within SEQ ID NO: 1023; 61) the heavy chain variable region comprises the CDR-H1, CDR-H2, CDR-H3 within SEQ ID NO: 950 and the light chain variable region comprises the CDR-L1, CDR-L2, CDR-L3 within SEQ ID NO: 1024; 62) the heavy chain variable region comprises the CDR-H1, CDR-H2, CDR-H3 within SEQ ID NO: 951 and the light chain variable region comprises the CDR-L1, CDR-L2, CDR-L3 within SEQ ID NO: 1025; 63) the heavy chain variable region comprises the CDR-H1, CDR-H2, CDR-H3 within SEQ ID NO: 952 and the light chain variable region comprises the CDR-L1, CDR-L2, CDR-L3 within SEQ ID NO: 1026; 64) the heavy chain variable region comprises the CDR-H1, CDR-H2, CDR-H3 within SEQ ID NO: 953 and the light chain variable region comprises the CDR-L1, CDR-L2, CDR-L3 within SEQ ID NO: 1027; 65) the heavy chain variable region comprises the CDR-H1, CDR-H2, CDR-H3 within SEQ ID NO: 954 and the light chain variable region comprises the CDR-L1, CDR-L2, CDR-L3 within SEQ ID NO: 1028; 66) the heavy chain variable region comprises the CDR-H1, CDR-H2, CDR-H3 within SEQ ID NO: 955 and the light chain variable region comprises the CDR-L1, CDR-L2, CDR-L3 within SEQ ID NO: 1029; 67) the heavy chain variable region comprises the CDR-H1, CDR-H2, CDR-H3 within SEQ ID NO: 956 and the light chain variable region comprises the CDR-L1, CDR-L2, CDR-L3 within SEQ ID NO: 1030; 68) the heavy chain variable region comprises the CDR-H1, CDR-H2, CDR-H3 within SEQ ID NO: 957 and the light chain variable region comprises the CDR-L1, CDR-L2, CDR-L3 within SEQ ID NO: 1031; 69) the heavy chain variable region comprises the CDR-H1, CDR-H2, CDR-H3 within SEQ ID NO: 958 and the light chain variable region comprises the CDR-L1, CDR-L2, CDR-L3 within SEQ ID NO: 1032; 70) the heavy chain variable region comprises the CDR-H1, CDR-H2, CDR-H3 within SEQ ID NO: 959 and the light chain variable region comprises the CDR-L1, CDR-L2, CDR-L3 within SEQ ID NO: 1033; 71) the heavy chain variable region comprises the CDR-H1, CDR-H2, CDR-H3 within SEQ ID NO: 960 and the light chain variable region comprises the CDR-L1, CDR-L2, CDR-L3 within SEQ ID NO: 1034; 72) the heavy chain variable region comprises the CDR-H1, CDR-H2, CDR-H3 within SEQ ID NO: 961 and the light chain variable region comprises the CDR-L1, CDR-L2, CDR-L3 within SEQ ID NO: 1035; 73) the heavy chain variable region comprises the CDR-H1, CDR-H2, CDR-H3 within SEQ ID NO: 962 and the light chain variable region comprises the CDR-L1, CDR-L2, CDR-L3 within SEQ ID NO: 1036; or 74) the heavy chain variable region comprises the CDR-H1, CDR-H2, CDR-H3 within SEQ ID NO: 963 and the light chain variable region comprises the CDR-L1, CDR-L2, CDR-L3 within SEQ ID NO: 1037.

[0237] In some embodiments of the anti-CD70 binding domains: 1) the heavy chain variable region comprises SEQ ID NO: 890 and the light chain variable region comprises SEQ ID NO: 964; 2) the heavy chain variable region comprises SEQ ID NO: 891 and the light chain variable region comprises SEQ ID NO: 965; 3) the heavy chain variable region comprises SEQ ID NO: 892 and the light chain variable region comprises SEQ ID NO: 966; 4) the heavy chain variable region comprises SEQ ID NO: 893 and the light chain variable region comprises SEQ ID NO: 967; 5) the heavy chain variable region comprises SEQ ID NO: 894 and the light chain variable region comprises SEQ ID NO: 968; 6) the heavy chain variable region comprises SEQ ID NO: 895 and the light chain variable region comprises SEQ ID NO: 969; 7) the heavy chain variable region comprises SEQ ID NO: 896 and the light chain variable region comprises SEQ ID NO: 970; 8) the heavy chain variable region comprises SEQ ID NO: 897 and the light chain variable region comprises SEQ ID NO: 971; 9) the heavy chain variable region comprises SEQ ID NO: 898 and the light chain variable region comprises SEQ ID NO: 972; 10) the heavy chain variable region comprises SEQ ID NO: 899 and the light chain variable region comprises SEQ ID NO: 973; 11) the heavy chain variable region comprises SEQ ID NO: 900 and the light chain variable region comprises SEQ ID NO: 974; 12) the heavy chain variable region comprises SEQ ID NO: 901 and the light chain variable region comprises SEQ ID NO: 975; 13) the heavy chain variable region comprises SEQ ID NO: 902 and the light chain variable region comprises SEQ ID NO: 976; 14) the heavy chain variable region comprises SEQ ID NO: 903 and the light chain variable region comprises SEQ ID NO: 977; 15) the heavy chain variable region comprises SEQ ID NO: 904 and the light chain variable region comprises SEQ ID NO: 978; 16) the heavy chain variable region comprises SEQ ID NO: 905 and the light chain variable region comprises SEQ ID NO: 979; 17) the heavy chain variable region comprises SEQ ID NO: 906 and the light chain variable region comprises SEQ ID NO: 980; 18) the heavy chain variable region comprises SEQ ID NO: 907 and the light chain variable region comprises SEQ ID NO: 981; 19) the heavy chain variable region comprises SEQ ID NO: 908 and the light chain variable region comprises SEQ ID NO: 982; 20) the heavy chain variable region comprises SEQ ID NO: 909 and the light chain variable region comprises SEQ ID NO: 983; 21) the heavy chain variable region comprises SEQ ID NO: 910 and the light chain variable region comprises SEQ ID NO: 984; 22) the heavy chain variable region comprises SEQ ID NO: 911 and the light chain variable region comprises SEQ ID NO: 985; 23) the heavy chain variable region comprises SEQ ID NO: 912 and the light chain variable region comprises SEQ ID NO: 986; 24) the heavy chain variable region comprises SEQ ID NO: 913 and the light chain variable region comprises SEQ ID NO: 987; 25) the heavy chain variable region comprises SEQ ID NO: 914 and the light chain variable region comprises SEQ ID NO: 988; 26) the heavy chain variable region comprises SEQ ID NO: 915 and the light chain variable region comprises SEQ ID NO: 989; 27) the heavy chain variable region comprises SEQ ID NO: 916 and the light chain variable region comprises SEQ ID NO: 990; 28) the heavy chain variable region comprises SEQ ID NO: 917 and the light chain variable region comprises SEQ ID NO: 991; 29) the heavy chain variable region comprises SEQ ID NO: 918 and the light chain variable region comprises SEQ ID NO: 992; 30) the heavy chain variable region comprises SEQ ID NO: 919 and the light chain variable region comprises SEQ ID NO: 993; 31) the heavy chain variable region comprises SEQ ID NO: 920 and the light chain variable region comprises SEQ ID NO: 994; 32) the heavy chain variable region comprises SEQ ID NO: 921 and the light chain variable region comprises SEQ ID NO: 995; 33) the heavy chain variable region comprises SEQ ID NO: 922 and the light chain variable region comprises SEQ ID NO: 996; 34) the heavy chain variable region comprises SEQ ID NO: 923 and the light chain variable region comprises SEQ ID NO: 997; 35) the heavy chain variable region comprises SEQ ID NO: 924 and the light chain variable region comprises SEQ ID NO: 998; 36) the heavy chain variable region comprises SEQ ID NO: 925 and the light chain variable region comprises SEQ ID NO: 999; 37) the heavy chain variable region comprises SEQ ID NO: 926 and the light chain variable region comprises SEQ ID NO: 1000; 38) the heavy chain variable region comprises SEQ ID NO: 927 and the light chain variable region comprises SEQ ID NO: 1001; 39) the heavy chain variable region comprises SEQ ID NO: 928 and the light chain variable region comprises SEQ ID NO: 1002; 40) the heavy chain variable region comprises SEQ ID NO: 929 and the light chain variable region comprises SEQ ID NO: 1003; 41) the heavy chain variable region comprises SEQ ID NO: 930 and the light chain variable region comprises SEQ ID NO: 1004; 42) the heavy chain variable region comprises SEQ ID NO: 931 and the light chain variable region comprises SEQ ID NO: 1005; 43) the heavy chain variable region comprises SEQ ID NO: 932 and the light chain variable region comprises SEQ ID NO: 1006; 44) the heavy chain variable region comprises SEQ ID NO: 933 and the light chain variable region comprises SEQ ID NO: 1007; 45) the heavy chain variable region comprises SEQ ID NO: 934 and the light chain variable region comprises SEQ ID NO: 1008; 46) the heavy chain variable region comprises SEQ ID NO: 935 and the light chain variable region comprises SEQ ID NO: 1009; 47) the heavy chain variable region comprises SEQ ID NO: 936 and the light chain variable region comprises SEQ ID NO: 1010; 48) the heavy chain variable region comprises SEQ ID NO: 937 and the light chain variable region comprises SEQ ID NO: 1011; 49) the heavy chain variable region comprises SEQ ID NO: 938 and the light chain variable region comprises SEQ ID NO: 1012; 50) the heavy chain variable region comprises SEQ ID NO: 939 and the light chain variable region comprises SEQ ID NO: 1013; 51) the heavy chain variable region comprises SEQ ID NO: 940 and the light chain variable region comprises SEQ ID NO: 1014; 52) the heavy chain variable region comprises SEQ ID NO: 941 and the light chain variable region comprises SEQ ID NO: 1015; 53) the heavy chain variable region comprises SEQ ID NO: 942 and the light chain variable region comprises SEQ ID NO: 1016; 54) the heavy chain variable region comprises SEQ ID NO: 943 and the light chain variable region comprises SEQ ID NO: 1017; 55) the heavy chain variable region comprises SEQ ID NO: 944 and the light chain variable region comprises SEQ ID NO: 1018; 56) the heavy chain variable region comprises SEQ ID NO: 945 and the light chain variable region comprises SEQ ID NO: 1019; 57) the heavy chain variable region comprises SEQ ID NO: 946 and the light chain variable region comprises SEQ ID NO: 1020; 58) the heavy chain variable region comprises SEQ ID NO: 947 and the light chain variable region comprises SEQ ID NO: 1021; 59) the heavy chain variable region comprises SEQ ID NO: 948 and the light chain variable region comprises SEQ ID NO: 1022; 60) the heavy chain variable region comprises SEQ ID NO: 949 and the light chain variable region comprises SEQ ID NO: 1023; 61) the heavy chain variable region comprises SEQ ID NO: 950 and the light chain variable region comprises SEQ ID NO: 1024; 62) the heavy chain variable region comprises SEQ ID NO: 951 and the light chain variable region comprises SEQ ID NO: 1025; 63) the heavy chain variable region comprises SEQ ID NO: 952 and the light chain variable region comprises SEQ ID NO: 1026; 64) the heavy chain variable region comprises SEQ ID NO: 953 and the light chain variable region comprises SEQ ID NO: 1027; 65) the heavy chain variable region comprises SEQ ID NO: 954 and the light chain variable region comprises SEQ ID NO: 1028; 66) the heavy chain variable region comprises SEQ ID NO: 955 and the light chain variable region comprises SEQ ID NO: 1029; 67) the heavy chain variable region comprises SEQ ID NO: 956 and the light chain variable region comprises SEQ ID NO: 1030; 68) the heavy chain variable region comprises SEQ ID NO: 957 and the light chain variable region comprises SEQ ID NO: 1031; 69) the heavy chain variable region comprises SEQ ID NO: 958 and the light chain variable region comprises SEQ ID NO: 1032; 70) the heavy chain variable region comprises SEQ ID NO: 959 and the light chain variable region comprises SEQ ID NO: 1033; 71) the heavy chain variable region comprises SEQ ID NO: 960 and the light chain variable region comprises SEQ ID NO: 1034; 72) the heavy chain variable region comprises SEQ ID NO: 961 and the light chain variable region comprises SEQ ID NO: 1035; 73) the heavy chain variable region comprises SEQ ID NO: 962 and the light chain variable region comprises SEQ ID NO: 1036; or 74) the heavy chain variable region comprises SEQ ID NO: 963 and the light chain variable region comprises SEQ ID NO: 1037.

[0238] In some embodiments of the anti-CD70 binding domains, the heavy chain variable region and/or light chain variable region comprise a framework. In some embodiments, the heavy chain variable region comprises a FW-H1, FW-H2, FW-H3, and FW-H4. In some embodiments, the heavy chain variable region comprises the order of FW-H1, CDR-H1, FW-H2, CDR-H2, FW-H3, CDR-H3, and FW-H4 from N-terminus to C-terminus. In some embodiments, the light chain variable region comprises a FW-L1, FW-L2, FW-L3, and FW-L4. In some embodiments, the light chain variable region comprises the order of FW-L1, CDR-L1, FW-L2, CDR-L2, FW-L3, CDR-L3, FW-LA from N-terminus to C-terminus. In some embodiments, the FW-H1 comprises a sequence having at least 95%, 99%, or 100% sequence identity to a sequence selected from SEQ ID NOs: 399-402; the FW-H2 comprises a sequence having at least 95%, 99%, or 100% sequence identity to a sequence selected from SEQ ID NOs: 403-406; the FW-H3 comprises a sequence having at least 95%, 99%, or 100% sequence identity to a sequence selected from SEQ ID NOs: 407-422; the FW-H4 comprises a sequence having at least 95%, 99%, or 100% sequence identity to a sequence selected from SEQ ID NOs: 423-427; the FW-L1 comprises a sequence having at least 95%, 99%, or 100% sequence identity to a sequence selected from SEQ ID NOs: 650-653; the FW-L2 comprises a sequence having at least 95%, 99%, or 100% sequence identity to a sequence selected from SEQ ID NOs: 654-657; the FW-L3 comprises a sequence having at least 95%, 99%, or 100% sequence identity to a sequence selected from SEQ ID NOs: 658-661; the FW-L4 comprises a sequence having at least 95%, 99%, or 100% sequence identity to a sequence selected from SEQ ID NOs: 662-667.

[0239] In some embodiments of the anti-CD70 binding domains, the heavy chain variable domain is encoded by a nucleic acid sequence having at least 75%, 80%, 85%, 90%, 95%, 99%, or 100% sequence identity to any sequence selected from SEQ ID NOs: 1038-1111.

[0240] In some embodiments of the anti-CD70 binding domains, the light chain variable domain is encoded by a nucleic acid sequence having at least 75%, 80%, 85%, 90%, 95%, 99%, or 100% sequence identity to any sequence selected from SEQ ID NOs: 1112-1185.

[0241] In some embodiments, the anti-CD70 binding domain is an antibody, Fab′ fragment, F(ab′)₂ fragment, or scFv.

[0242] In several embodiments, the anti-CD70 binding domain is encoded by a polynucleotide sequence comprising a sequence that is at least 70%, 75%, 80%, 85%, 90%, 91%, 92%, 93%, 94%, 95%, 96%, 97%, 98%, 99%, or more, or a range defined by any two of the aforementioned percentages, identical to the sequence of one or more of SEQ ID NOs: 38-120, 221-229, 1038-1111, and/or 1112-1185. In several embodiments, the anti-CD70 binding domain comprises an amino acid sequences that has at least about 85%, about 90%, about 95%, or more, sequence identity to one or more of SEQ ID NOs: 230-312, 890-963, 964-1037.

[0243] Also disclosed herein are CARs. In some embodiments, the CARs are anti-CD70 CARs. In some embodiments, the CARs comprise any one or more of the anti-CD70 binding domains disclosed herein.

[0244] In some embodiments, the CARs further comprise an OX40 subdomain and a CD3zeta subdomain. In several embodiments, the OX40 subdomain is encoded by a sequence having at least 95% sequence identity to SEQ ID NO: 5. In several embodiments, the OX40 subdomain comprises an amino acid sequence having at least 85%, at least 90%, at least 95%, at least 99%, or at least 100% sequence identity to SEQ ID NO: 6. In several embodiments, the CD3zeta subdomain is encoded by a sequence having at least 95% sequence identity to SEQ ID NO: 7. In several embodiments, the CD3zeta subdomain comprises an amino acid sequence having at least 85%, at least 90%, at least 95%, at least 99%, or at least 100% sequence identity to SEQ ID NO: 8. In several embodiments, the mbIL15 is encoded by a sequence having at least 95% sequence identity to SEQ ID NO: 1188. In several embodiments, the one or more of SEQ ID NOS: 36-120, 221-229, 1038-1111, and/or 1112-1185, the polynucleotide encoding the OX40 subdomain, the polynucleotide encoding the CD3zeta subdomain, and the polynucleotide encoding mbIL15 are arranged in a 5′ to 3′ orientation within the polynucleotide.

[0245] In several embodiments, an anti-CD70 CAR is provided and is encoded by a polynucleotide having at least 70%, 75%, 80%, 85%, 90%, 91%, 92%, 93%, 94%, 95%, 96%, 97%, 98%, 99%, or more, or a range defined by any two of the aforementioned percentages, identical to the sequence of one or more of SEQ ID NOs: 138-220 or a portion thereof (e.g. a portion excluding the mbIL15 sequence and/or self-cleaving peptide sequence). In several embodiments, the CAR comprises an amino acid sequence having at least 70%, 75%, 80%, 85%, 90%, 91%, 92%, 93%, 94%, 95%, 96%, 97%, 98%, 99%, or more, or a range defined by any two of the aforementioned percentages, identical to the sequence of one or more of SEQ ID NOs 313-395, or a portion thereof (e.g. a portion excluding the mbIL15 sequence and/or self-cleaving peptide sequence).

[0246] In several embodiments, there is provided a polynucleotide encoding a Tumor Binder/CD8hinge/CD8hinge-CD8TM/4-1BB/CD3zeta chimeric antigen receptor complex (see FIG. 1, CAR1a). The polynucleotide comprises or is composed of a Tumor Binder, a CD8a hinge, a CD8a transmembrane domain, a 4-1BB domain, and a CD3zeta domain, as described herein. In several embodiments, this receptor complex is encoded by a nucleic acid molecule comprising a sequence obtained from a combination of sequences disclosed herein, or comprises an amino acid sequence obtained from a combination of sequences disclosed herein. In several embodiments, the encoding nucleic acid sequence, or the amino acid sequence, comprises a sequence in accordance with one or more SEQ ID NOS as described herein, such as those included herein as examples of constituent parts. In several embodiments, the encoding nucleic acid sequence, or the amino acid sequence, comprises a sequence that shares at least about 90%, at least about 94%, at least about 95%, at least about 96%, at least about 97%, at least about 98%, or at least about 99%, sequence identity, homology and/or functional equivalence with a sequence resulting from the combination one or more SEQ ID NOS as described herein. It shall be appreciated that certain sequence variability, extensions, and/or truncations of the disclosed sequences may result when combining sequences, as a result of, for example, case or efficiency in cloning (e.g., for creation of a restriction site).

[0247] In several embodiments, there is provided a polynucleotide encoding a Tumor Binder/CD8hinge/CD8hinge-CD8TM/4-1BB/CD3zeta/2A/mIL-15 chimeric antigen receptor complex (see FIG. 1, CAR 1b). The polynucleotide comprises or is composed of a Tumor Binder, a CD8a hinge, a CD8a transmembrane domain, a 4-1BB domain, a CD3zeta domain, a 2A cleavage site, and an mIL-15 domain as described herein. In several embodiments, this receptor complex is encoded by a nucleic acid molecule comprising a sequence obtained from a combination of sequences disclosed herein, or comprises an amino acid sequence obtained from a combination of sequences disclosed herein. In several embodiments, the encoding nucleic acid sequence, or the amino acid sequence, comprises a sequence in accordance with one or more SEQ ID NOS as described herein, such as those included herein as examples of constituent parts. In several embodiments, the encoding nucleic acid sequence, or the amino acid sequence, comprises a sequence that shares at least about 90%, at least about 94%, at least about 95%, at least about 96%, at least about 97%, at least about 98%, or at least about 99%, sequence identity, homology and/or functional equivalence with a sequence resulting from the combination one or more SEQ ID NOS as described herein. It shall be appreciated that certain sequence variability, extensions, and/or truncations of the disclosed sequences may result when combining sequences, as a result of, for example, case or efficiency in cloning (e.g., for creation of a restriction site).

[0248] In one embodiment, there is provided a polynucleotide encoding a Tumor Binder/CD8hinge-CD8TM/OX40/CD3zeta chimeric antigen receptor complex (see FIG. 1, CAR1c). The polynucleotide comprises or is composed of tumor binder, a CD8a hinge, a CD8a transmembrane domain, an OX40 domain, and a CD3zeta domain as described herein. In several embodiments, this receptor complex is encoded by a nucleic acid molecule comprising a sequence obtained from a combination of sequences disclosed herein, or comprises an amino acid sequence obtained from a combination of sequences disclosed herein. In several embodiments, the encoding nucleic acid sequence, or the amino acid sequence, comprises a sequence in accordance with one or more SEQ ID NOS as described herein, such as those included herein as examples of constituent parts. In several embodiments, the encoding nucleic acid sequence, or the amino acid sequence, comprises a sequence that shares at least about 90%, at least about 94%, at least about 95%, at least about 96%, at least about 97%, at least about 98%, or at least about 99%, sequence identity, homology and/or functional equivalence with a sequence resulting from the combination one or more SEQ ID NOS as described herein. It shall be appreciated that certain sequence variability, extensions, and/or truncations of the disclosed sequences may result when combining sequences, as a result of, for example, case or efficiency in cloning (e.g., for creation of a restriction site).

[0249] In several embodiments, there is provided a polynucleotide encoding a tumor binder/CD8hinge-CD8TM/OX40/CD3zeta/2A/mIL-15 chimeric antigen receptor complex (see FIG. 1, CAR 1d). The polynucleotide comprises or is composed of a Tumor Binder, a CD8a hinge, a CD8a transmembrane domain, an OX40 domain, a CD3zeta domain, a 2A cleavage site, and an mIL-15 domain as described herein. In several embodiments, this receptor complex is encoded by a nucleic acid molecule comprising a sequence obtained from a combination of sequences disclosed herein, or comprises an amino acid sequence obtained from a combination of sequences disclosed herein. In several embodiments, the encoding nucleic acid sequence, or the amino acid sequence, comprises a sequence in accordance with one or more SEQ ID NOS as described herein, such as those included herein as examples of constituent parts. In several embodiments, the encoding nucleic acid sequence, or the amino acid sequence, comprises a sequence that shares at least about 90%, at least about 94%, at least about 95%, at least about 96%, at least about 97%, at least about 98%, or at least about 99%, sequence identity, homology and/or functional equivalence with a sequence resulting from the combination one or more SEQ ID NOS as described herein. It shall be appreciated that certain sequence variability, extensions, and/or truncations of the disclosed sequences may result when combining sequences, as a result of, for example, case or efficiency in cloning (e.g., for creation of a restriction site). In several embodiments, the anti-CD70 binding domain comprises a polynucleotide sequence that is at least 70%, 75%, 80%, 85%, 90%, 91%, 92%, 93%, 94%, 95%, 96%, 97%, 98%, 99%, or more, or a range defined by any two of the aforementioned percentages, identical to the sequence of either SEQ ID NO: 36 and/or SEQ ID NO: 37. In several embodiments, the anti-CD70 binding domain comprises a polynucleotide sequence that is at least 70%, 75%, 80%, 85%, 90%, 91%, 92%, 93%, 94%, 95%, 96%, 97%, 98%, 99%, or more, or a range defined by any two of the aforementioned percentages, identical to the sequence of either SEQ ID NOs: 38-120, 221-229, 1038-1111, and/or 1112-1185. In several embodiments, an anti-CD70 CAR is provided and is encoded by a polynucleotide having at least 70%, 75%, 80%, 85%, 90%, 91%, 92%, 93%, 94%, 95%, 96%, 97%, 98%, 99%, or more, or a range defined by any two of the aforementioned percentages, identical to the sequence of one or more of SEQ ID NOs: 138-220, or a portion thereof (e.g. a portion excluding the mbIL15 sequence and/or self-cleaving peptide sequence). In several embodiments, the CAR comprises an amino acid sequences having at least 70%, 75%, 80%, 85%, 90%, 91%, 92%, 93%, 94%, 95%, 96%, 97%, 98%, 99%, or more, or a range defined by any two of the aforementioned percentages, identical to the sequence of one or more of SEQ ID NOs 313-395, or a portion thereof (e.g. a portion excluding the mbIL15 sequence and/or self-cleaving peptide sequence).

[0250] In several embodiments, there is provided a polynucleotide encoding a Tumor Binder/CD8hinge-CD28TM/CD28/CD3zeta chimeric antigen receptor complex (see FIG. 1, CAR1e). The polynucleotide comprises or is composed of a Tumor Binder, a CD8a hinge, a CD28 transmembrane domain, a CD28 domain, and a CD3zeta domain as described herein. In several embodiments, this receptor complex is encoded by a nucleic acid molecule comprising a sequence obtained from a combination of sequences disclosed herein, or comprises an amino acid sequence obtained from a combination of sequences disclosed herein. In several embodiments, the encoding nucleic acid sequence, or the amino acid sequence, comprises a sequence in accordance with one or more SEQ ID NOS as described herein, such as those included herein as examples of constituent parts. In several embodiments, the encoding nucleic acid sequence, or the amino acid sequence, comprises a sequence that shares at least about 90%, at least about 94%, at least about 95%, at least about 96%, at least about 97%, at least about 98%, or at least about 99%, sequence identity, homology and/or functional equivalence with a sequence resulting from the combination one or more SEQ ID NOS as described herein. It shall be appreciated that certain sequence variability, extensions, and/or truncations of the disclosed sequences may result when combining sequences, as a result of, for example, case or efficiency in cloning (e.g., for creation of a restriction site).

[0251] In several embodiments, there is provided a polynucleotide encoding a Tumor Binder/CD8hinge-CD28TM/CD28/CD3zeta/2A/mIL-15 chimeric antigen receptor complex (see FIG. 1, CAR1f). The polynucleotide comprises or is composed of a Tumor Binder, a CD8a hinge, a CD28 transmembrane domain, a CD28 domain, a CD3zeta domain, a 2A cleavage site, and an mIL-15 domain as described herein. In several embodiments, this receptor complex is encoded by a nucleic acid molecule comprising a sequence obtained from a combination of sequences disclosed herein, or comprises an amino acid sequence obtained from a combination of sequences disclosed herein. In several embodiments, the encoding nucleic acid sequence, or the amino acid sequence, comprises a sequence in accordance with one or more SEQ ID NOS as described herein, such as those included herein as examples of constituent parts. In several embodiments, the encoding nucleic acid sequence, or the amino acid sequence, comprises a sequence that shares at least about 90%, at least about 94%, at least about 95%, at least about 96%, at least about 97%, at least about 98%, or at least about 99%, sequence identity, homology and/or functional equivalence with a sequence resulting from the combination one or more SEQ ID NOS as described herein. It shall be appreciated that certain sequence variability, extensions, and/or truncations of the disclosed sequences may result when combining sequences, as a result of, for example, case or efficiency in cloning (e.g., for creation of a restriction site).

[0252] In several embodiments, there is provided a polynucleotide encoding a Tumor Binder/CD8hinge/CD8aTM/ICOS/CD3zeta chimeric antigen receptor complex (see FIG. 1, CAR1g). The polynucleotide comprises or is composed of a Tumor Binder, a CD8a hinge, a CD8a transmembrane domain, inducible costimulator (ICOS) signaling domain, and a CD3zeta domain. In several embodiments, the polynucleotide further encodes mbIL15 (see FIG. 1, CAR1h). In several embodiments, this receptor complex is encoded by a nucleic acid molecule comprising a sequence obtained from a combination of sequences disclosed herein, or comprises an amino acid sequence obtained from a combination of sequences disclosed herein. In several embodiments, the encoding nucleic acid sequence, or the amino acid sequence, comprises a sequence in accordance with one or more SEQ ID NOS as described herein, such as those included herein as examples of constituent parts. In several embodiments, the encoding nucleic acid sequence, or the amino acid sequence, comprises a sequence that shares at least about 90%, at least about 94%, at least about 95%, at least about 96%, at least about 97%, at least about 98%, or at least about 99%, sequence identity, homology and/or functional equivalence with a sequence resulting from the combination one or more SEQ ID NOS as described herein. It shall be appreciated that certain sequence variability, extensions, and/or truncations of the disclosed sequences may result when combining sequences, as a result of, for example, case or efficiency in cloning (e.g., for creation of a restriction site).

[0253] In several embodiments, there is provided a polynucleotide encoding a Tumor Binder/CD8hinge/CD8aTM/CD28/4-1BB/CD3zeta chimeric antigen receptor complex (see FIG. 1, CAR1i). The polynucleotide comprises or is composed of a Tumor Binder, a CD8a hinge, a CD8a transmembrane domain, a CD28 signaling domain, a 4-1BB signaling domain, and a CD3zeta domain. In several embodiments, the polynucleotide further encodes mbIL15 (see FIG. 1, CAR1j). In several embodiments, this receptor complex is encoded by a nucleic acid molecule comprising a sequence obtained from a combination of sequences disclosed herein, or comprises an amino acid sequence obtained from a combination of sequences disclosed herein. In several embodiments, the encoding nucleic acid sequence, or the amino acid sequence, comprises a sequence in accordance with one or more SEQ ID NOS as described herein, such as those included herein as examples of constituent parts. In several embodiments, the encoding nucleic acid sequence, or the amino acid sequence, comprises a sequence that shares at least about 90%, at least about 94%, at least about 95%, at least about 96%, at least about 97%, at least about 98%, or at least about 99%, sequence identity, homology and/or functional equivalence with a sequence resulting from the combination one or more SEQ ID NOS as described herein. It shall be appreciated that certain sequence variability, extensions, and/or truncations of the disclosed sequences may result when combining sequences, as a result of, for example, case or efficiency in cloning (e.g., for creation of a restriction site).

[0254] In several embodiments, there is provided a polynucleotide encoding a Tumor Binder/CD8hinge/NKG2DTM/OX40/CD3zeta chimeric antigen receptor complex (see FIG. 2, CAR2a). The polynucleotide comprises or is composed of a Tumor Binder (such as a light chain variable region of an scFv), a CD8a hinge, an NKG2D transmembrane domain, an OX40 signaling domain, and a CD3zeta domain. In several embodiments, the polynucleotide further encodes mbIL15 (see FIG. 2, CAR2b). In several embodiments, this receptor complex is encoded by a nucleic acid molecule comprising a sequence obtained from a combination of sequences disclosed herein, or comprises an amino acid sequence obtained from a combination of sequences disclosed herein. In several embodiments, the encoding nucleic acid sequence, or the amino acid sequence, comprises a sequence in accordance with one or more SEQ ID NOS as described herein, such as those included herein as examples of constituent parts. In several embodiments, the encoding nucleic acid sequence, or the amino acid sequence, comprises a sequence that shares at least about 90%, at least about 94%, at least about 95%, at least about 96%, at least about 97%, at least about 98%, or at least about 99%, sequence identity, homology and/or functional equivalence with a sequence resulting from the combination one or more SEQ ID NOS as described herein. It shall be appreciated that certain sequence variability, extensions, and/or truncations of the disclosed sequences may result when combining sequences, as a result of, for example, case or efficiency in cloning (e.g., for creation of a restriction site).

[0255] In several embodiments, there is provided a polynucleotide encoding a Tumor Binder/CD8hinge/CD8aTM/OX40/CD3zeta/2A/EGFRt chimeric antigen receptor complex (see FIG. 2, CAR2c). The polynucleotide comprises or is composed of a Tumor Binder, a CD8a hinge, a CD8a transmembrane domain, an OX40 signaling domain, a CD3zeta domain, a 2A cleavage side, and a truncated version of the epidermal growth factor receptor (EGFRt). In several embodiments, the chimeric antigen receptor further comprises mbIL15 (see FIG. 2, CAR2f). In several embodiments, this receptor complex is encoded by a nucleic acid molecule comprising a sequence obtained from a combination of sequences disclosed herein, or comprises an amino acid sequence obtained from a combination of sequences disclosed herein. In several embodiments, the encoding nucleic acid sequence, or the amino acid sequence, comprises a sequence in accordance with one or more SEQ ID NOS as described herein, such as those included herein as examples of constituent parts. In several embodiments, the encoding nucleic acid sequence, or the amino acid sequence, comprises a sequence that shares at least about 90%, at least about 94%, at least about 95%, at least about 96%, at least about 97%, at least about 98%, or at least about 99%, sequence identity, homology and/or functional equivalence with a sequence resulting from the combination one or more SEQ ID NOS as described herein. It shall be appreciated that certain sequence variability, extensions, and/or truncations of the disclosed sequences may result when combining sequences, as a result of, for example, case or efficiency in cloning (e.g., for creation of a restriction site).

[0256] In several embodiments, there is provided a polynucleotide encoding a Tumor Binder/CD8hinge/NKG2DTM/OX40/CD3zeta chimeric antigen receptor complex (see FIG. 2, CAR2g). The polynucleotide comprises or is composed of a Tumor Binder (such as a heavy chain variable region of an scFv), a CD8a hinge, an NKG2D transmembrane domain, an OX40 signaling domain, and a CD3zeta domain. In several embodiments, the polynucleotide further encodes mbIL15 (see FIG. 2, CAR2h). In several embodiments, this receptor complex is encoded by a nucleic acid molecule comprising a sequence obtained from a combination of sequences disclosed herein, or comprises an amino acid sequence obtained from a combination of sequences disclosed herein. In several embodiments, the encoding nucleic acid sequence, or the amino acid sequence, comprises a sequence in accordance with one or more SEQ ID NOS as described herein, such as those included herein as examples of constituent parts. In several embodiments, the encoding nucleic acid sequence, or the amino acid sequence, comprises a sequence that shares at least about 90%, at least about 94%, at least about 95%, at least about 96%, at least about 97%, at least about 98%, or at least about 99%, sequence identity, homology and/or functional equivalence with a sequence resulting from the combination one or more SEQ ID NOS as described herein. It shall be appreciated that certain sequence variability, extensions, and/or truncations of the disclosed sequences may result when combining sequences, as a result of, for example, case or efficiency in cloning (e.g., for creation of a restriction site).

[0257] In several embodiments, there is provided a polynucleotide encoding a Tumor Binder/Ig4SH-CD28TM/CD28/CD3zeta chimeric antigen receptor complex (see FIG. 2, CAR2i). The polynucleotide comprises or is composed of a Tumor Binder, an Ig4 SH domain, a CD28 transmembrane domain, a CD28 domain, and a CD3zeta domain as described herein. In several embodiments, the polynucleotide further encodes mbIL15 (see FIG. 2, CAR2j). In several embodiments, this receptor complex is encoded by a nucleic acid molecule comprising a sequence obtained from a combination of sequences disclosed herein, or comprises an amino acid sequence obtained from a combination of sequences disclosed herein. In several embodiments, the encoding nucleic acid sequence, or the amino acid sequence, comprises a sequence in accordance with one or more SEQ ID NOS as described herein, such as those included herein as examples of constituent parts. In several embodiments, the encoding nucleic acid sequence, or the amino acid sequence, comprises a sequence that shares at least about 90%, at least about 94%, at least about 95%, at least about 96%, at least about 97%, at least about 98%, or at least about 99%, sequence identity, homology and/or functional equivalence with a sequence resulting from the combination one or more SEQ ID NOS as described herein. It shall be appreciated that certain sequence variability, extensions, and/or truncations of the disclosed sequences may result when combining sequences, as a result of, for example, case or efficiency in cloning (e.g., for creation of a restriction site).

[0258] In several embodiments, there is provided a polynucleotide encoding a Tumor Binder/CD8hinge/CD8aTM/CD27/CD3zeta chimeric antigen receptor complex (see FIG. 3, CAR3a). The polynucleotide comprises or is composed of a Tumor Binder, a CD8a hinge, a CD8a transmembrane domain, a CD27 signaling domain, and a CD3zeta domain. In several embodiments, the polynucleotide further encodes mbIL15 (see FIG. 3, CAR3b). In several embodiments, this receptor complex is encoded by a nucleic acid molecule comprising a sequence obtained from a combination of sequences disclosed herein, or comprises an amino acid sequence obtained from a combination of sequences disclosed herein. In several embodiments, the encoding nucleic acid sequence, or the amino acid sequence, comprises a sequence in accordance with one or more SEQ ID NOS as described herein, such as those included herein as examples of constituent parts. In several embodiments, the encoding nucleic acid sequence, or the amino acid sequence, comprises a sequence that shares at least about 90%, at least about 94%, at least about 95%, at least about 96%, at least about 97%, at least about 98%, or at least about 99%, sequence identity, homology and/or functional equivalence with a sequence resulting from the combination one or more SEQ ID NOS as described herein. It shall be appreciated that certain sequence variability, extensions, and/or truncations of the disclosed sequences may result when combining sequences, as a result of, for example, case or efficiency in cloning (e.g., for creation of a restriction site).

[0259] In several embodiments, there is provided a polynucleotide encoding a Tumor Binder/CD8hinge/CD8aTM/CD70/CD3zeta chimeric antigen receptor complex (see FIG. 3, CAR3c). The polynucleotide comprises or is composed of a Tumor Binder, a CD8a hinge, a CD8a transmembrane domain, a CD70 signaling domain, and a CD3zeta domain. In several embodiments, the polynucleotide further encodes mbIL15 (see FIG. 3, CAR3d). In several embodiments, this receptor complex is encoded by a nucleic acid molecule comprising a sequence obtained from a combination of sequences disclosed herein, or comprises an amino acid sequence obtained from a combination of sequences disclosed herein. In several embodiments, the encoding nucleic acid sequence, or the amino acid sequence, comprises a sequence in accordance with one or more SEQ ID NOS as described herein, such as those included herein as examples of constituent parts. In several embodiments, the encoding nucleic acid sequence, or the amino acid sequence, comprises a sequence that shares at least about 90%, at least about 94%, at least about 95%, at least about 96%, at least about 97%, at least about 98%, or at least about 99%, sequence identity, homology and/or functional equivalence with a sequence resulting from the combination one or more SEQ ID NOS as described herein. It shall be appreciated that certain sequence variability, extensions, and/or truncations of the disclosed sequences may result when combining sequences, as a result of, for example, case or efficiency in cloning (e.g., for creation of a restriction site).

[0260] In several embodiments, there is provided a polynucleotide encoding a Tumor Binder/CD8hinge/CD8aTM/CD161/CD3zeta chimeric antigen receptor complex (see FIG. 3, CAR3c). The polynucleotide comprises or is composed of a Tumor Binder, a CD8a hinge, a CD8a transmembrane domain, a CD161 signaling domain, and a CD3zeta domain. In several embodiments, the polynucleotide further encodes mbIL15 (see FIG. 3, CAR3f). In several embodiments, this receptor complex is encoded by a nucleic acid molecule comprising a sequence obtained from a combination of sequences disclosed herein, or comprises an amino acid sequence obtained from a combination of sequences disclosed herein. In several embodiments, the encoding nucleic acid sequence, or the amino acid sequence, comprises a sequence in accordance with one or more SEQ ID NOS as described herein, such as those included herein as examples of constituent parts. In several embodiments, the encoding nucleic acid sequence, or the amino acid sequence, comprises a sequence that shares at least about 90%, at least about 94%, at least about 95%, at least about 96%, at least about 97%, at least about 98%, or at least about 99%, sequence identity, homology and/or functional equivalence with a sequence resulting from the combination one or more SEQ ID NOS as described herein. It shall be appreciated that certain sequence variability, extensions, and/or truncations of the disclosed sequences may result when combining sequences, as a result of, for example, case or efficiency in cloning (e.g., for creation of a restriction site).

[0261] In several embodiments, there is provided a polynucleotide encoding a Tumor Binder/CD8hinge/CD8aTM/CD40L/CD3zeta chimeric antigen receptor complex (see FIG. 3, CAR3g). The polynucleotide comprises or is composed of a Tumor Binder, a CD8a hinge, a CD8a transmembrane domain, a CD40L signaling domain, and a CD3zeta domain. In several embodiments, the polynucleotide further encodes mbIL15 (see FIG. 3, CAR3h). In several embodiments, this receptor complex is encoded by a nucleic acid molecule comprising a sequence obtained from a combination of sequences disclosed herein, or comprises an amino acid sequence obtained from a combination of sequences disclosed herein. In several embodiments, the encoding nucleic acid sequence, or the amino acid sequence, comprises a sequence in accordance with one or more SEQ ID NOS as described herein, such as those included herein as examples of constituent parts. In several embodiments, the encoding nucleic acid sequence, or the amino acid sequence, comprises a sequence that shares at least about 90%, at least about 94%, at least about 95%, at least about 96%, at least about 97%, at least about 98%, or at least about 99%, sequence identity, homology and/or functional equivalence with a sequence resulting from the combination one or more SEQ ID NOS as described herein. It shall be appreciated that certain sequence variability, extensions, and/or truncations of the disclosed sequences may result when combining sequences, as a result of, for example, case or efficiency in cloning (e.g., for creation of a restriction site).

[0262] In several embodiments, there is provided a polynucleotide encoding a Tumor Binder/CD8hinge/CD8aTM/CD44/CD3zeta chimeric antigen receptor complex (see FIG. 3, CAR3i). The polynucleotide comprises or is composed of a Tumor Binder, a CD8a hinge, a CD8a transmembrane domain, a CD44 signaling domain, and a CD3zeta domain. In several embodiments, the polynucleotide further encodes mbIL15 (see FIG. 3, CAR3j). In several embodiments, this receptor complex is encoded by a nucleic acid molecule comprising a sequence obtained from a combination of sequences disclosed herein, or comprises an amino acid sequence obtained from a combination of sequences disclosed herein. In several embodiments, the encoding nucleic acid sequence, or the amino acid sequence, comprises a sequence in accordance with one or more SEQ ID NOS as described herein, such as those included herein as examples of constituent parts. In several embodiments, the encoding nucleic acid sequence, or the amino acid sequence, comprises a sequence that shares at least about 90%, at least about 94%, at least about 95%, at least about 96%, at least about 97%, at least about 98%, or at least about 99%, sequence identity, homology and/or functional equivalence with a sequence resulting from the combination one or more SEQ ID NOS as described herein. It shall be appreciated that certain sequence variability, extensions, and/or truncations of the disclosed sequences may result when combining sequences, as a result of, for example, case or efficiency in cloning (e.g., for creation of a restriction site).

[0263] In several embodiments, there is provided a polynucleotide encoding a Tumor Binder/Ig4SH-CD8TM/4-1BB/CD3zeta chimeric antigen receptor complex (see FIG. 4, CAR4a). The polynucleotide comprises or is composed of a Tumor Binder, an Ig4 SH domain, a CD8a transmembrane domain, a 4-1BB domain, and a CD3zeta domain as described herein. In several embodiments, the polynucleotide further encodes mbIL15 (see FIG. 4, CAR4b). In several embodiments, this receptor complex is encoded by a nucleic acid molecule comprising a sequence obtained from a combination of sequences disclosed herein, or comprises an amino acid sequence obtained from a combination of sequences disclosed herein. In several embodiments, the encoding nucleic acid sequence, or the amino acid sequence, comprises a sequence in accordance with one or more SEQ ID NOS as described herein, such as those included herein as examples of constituent parts. In several embodiments, the encoding nucleic acid sequence, or the amino acid sequence, comprises a sequence that shares at least about 90%, at least about 94%, at least about 95%, at least about 96%, at least about 97%, at least about 98%, or at least about 99%, sequence identity, homology and/or functional equivalence with a sequence resulting from the combination one or more SEQ ID NOS as described herein. It shall be appreciated that certain sequence variability, extensions, and/or truncations of the disclosed sequences may result when combining sequences, as a result of, for example, ease or efficiency in cloning (e.g., for creation of a restriction site).

[0264] In several embodiments, there is provided a polynucleotide encoding a Tumor Binder/Ig4SH-CD8TM/OX40/CD3zeta chimeric antigen receptor complex (see FIG. 4, CAR4c). The polynucleotide comprises or is composed of a Tumor Binder, a Ig4 SH domain, a CD8a transmembrane domain, an OX40 domain, and a CD3zeta domain as described herein. In several embodiments, the polynucleotide further encodes mbIL15 (see FIG. 4, CAR4d). In several embodiments, this receptor complex is encoded by a nucleic acid molecule comprising a sequence obtained from a combination of sequences disclosed herein, or comprises an amino acid sequence obtained from a combination of sequences disclosed herein. In several embodiments, the encoding nucleic acid sequence, or the amino acid sequence, comprises a sequence in accordance with one or more SEQ ID NOS as described herein, such as those included herein as examples of constituent parts. In several embodiments, the encoding nucleic acid sequence, or the amino acid sequence, comprises a sequence that shares at least about 90%, at least about 94%, at least about 95%, at least about 96%, at least about 97%, at least about 98%, or at least about 99%, sequence identity, homology and/or functional equivalence with a sequence resulting from the combination one or more SEQ ID NOS as described herein. It shall be appreciated that certain sequence variability, extensions, and/or truncations of the disclosed sequences may result when combining sequences, as a result of, for example, case or efficiency in cloning (e.g., for creation of a restriction site).

[0265] In several embodiments, there is provided a polynucleotide encoding a Tumor Binder/CD8hinge-CD3aTM/CD28/CD3zeta chimeric antigen receptor complex (see FIG. 4, CAR4c). The polynucleotide comprises or is composed of a Tumor Binder, a CD8a hinge, a CD3a transmembrane domain, a CD28 domain, and a CD3zeta domain as described herein. In several embodiments, the polynucleotide further encodes mbIL15 (see FIG. 4, CAR4f). In several embodiments, this receptor complex is encoded by a nucleic acid molecule comprising a sequence obtained from a combination of sequences disclosed herein, or comprises an amino acid sequence obtained from a combination of sequences disclosed herein. In several embodiments, the encoding nucleic acid sequence, or the amino acid sequence, comprises a sequence in accordance with one or more SEQ ID NOS as described herein, such as those included herein as examples of constituent parts. In several embodiments, the encoding nucleic acid sequence, or the amino acid sequence, comprises a sequence that shares at least about 90%, at least about 94%, at least about 95%, at least about 96%, at least about 97%, at least about 98%, or at least about 99%, sequence identity, homology and/or functional equivalence with a sequence resulting from the combination one or more SEQ ID NOS as described herein. It shall be appreciated that certain sequence variability, extensions, and/or truncations of the disclosed sequences may result when combining sequences, as a result of, for example, case or efficiency in cloning (e.g., for creation of a restriction site).

[0266] In several embodiments, there is provided a polynucleotide encoding a Tumor Binder/CD8hinge-CD28TM/CD28/4-1BB/CD3zeta chimeric antigen receptor complex (see FIG. 4, CAR 4g). The polynucleotide comprises or is composed of a Tumor Binder, a CD8a hinge, a CD28 transmembrane domain, a CD28 domain, a 4-1BB domain, and a CD3zeta domain as described herein. In several embodiments, the polynucleotide further encodes mbIL15 (see FIG. 4, CAR4h). In several embodiments, this receptor complex is encoded by a nucleic acid molecule comprising a sequence obtained from a combination of sequences disclosed herein, or comprises an amino acid sequence obtained from a combination of sequences disclosed herein. In several embodiments, the encoding nucleic acid sequence, or the amino acid sequence, comprises a sequence in accordance with one or more SEQ ID NOS as described herein, such as those included herein as examples of constituent parts. In several embodiments, the encoding nucleic acid sequence, or the amino acid sequence, comprises a sequence that shares at least about 90%, at least about 94%, at least about 95%, at least about 96%, at least about 97%, at least about 98%, or at least about 99%, sequence identity, homology and/or functional equivalence with a sequence resulting from the combination one or more SEQ ID NOS as described herein. It shall be appreciated that certain sequence variability, extensions, and/or truncations of the disclosed sequences may result when combining sequences, as a result of, for example, case or efficiency in cloning (e.g., for creation of a restriction site).

[0267] In several embodiments, there is provided a polynucleotide encoding a Tumor Binder/CD8 alpha hinge/CD8 alpha TM/4-1BB/CD3zeta chimeric antigen receptor complex (see FIG. 5, CAR5a). The polynucleotide comprises or is composed of a Tumor Binder, a CD8a hinge, a CD8a transmembrane domain, a 4-1BB domain, and a CD3zeta domain as described herein. In several embodiments, the polynucleotide further encodes mbIL15 (see FIG. 5, CAR5b). In several embodiments, this receptor complex is encoded by a nucleic acid molecule comprising a sequence obtained from a combination of sequences disclosed herein, or comprises an amino acid sequence obtained from a combination of sequences disclosed herein. In several embodiments, the encoding nucleic acid sequence, or the amino acid sequence, comprises a sequence in accordance with one or more SEQ ID NOS as described herein, such as those included herein as examples of constituent parts. In several embodiments, the encoding nucleic acid sequence, or the amino acid sequence, comprises a sequence that shares at least about 90%, at least about 94%, at least about 95%, at least about 96%, at least about 97%, at least about 98%, or at least about 99%, sequence identity, homology and/or functional equivalence with a sequence resulting from the combination one or more SEQ ID NOS as described herein. It shall be appreciated that certain sequence variability, extensions, and/or truncations of the disclosed sequences may result when combining sequences, as a result of, for example, case or efficiency in cloning (e.g., for creation of a restriction site).

[0268] In several embodiments, there is provided a polynucleotide encoding a Tumor Binder/CD8 alpha hinge/CD3 TM/4-1BB/CD3zeta chimeric antigen receptor complex (see FIG. 5, CAR5c). The polynucleotide comprises or is composed of a Tumor Binder, a CD8a hinge, a CD3 transmembrane domain, a 4-1BB domain, and a CD3zeta domain as described herein. In several embodiments, the polynucleotide further encodes mbIL15 (see FIG. 5, CAR5d). In several embodiments, this receptor complex is encoded by a nucleic acid molecule comprising a sequence obtained from a combination of sequences disclosed herein, or comprises an amino acid sequence obtained from a combination of sequences disclosed herein. In several embodiments, the encoding nucleic acid sequence, or the amino acid sequence, comprises a sequence in accordance with one or more SEQ ID NOS as described herein, such as those included herein as examples of constituent parts. In several embodiments, the encoding nucleic acid sequence, or the amino acid sequence, comprises a sequence that shares at least about 90%, at least about 94%, at least about 95%, at least about 96%, at least about 97%, at least about 98%, or at least about 99%, sequence identity, homology and/or functional equivalence with a sequence resulting from the combination one or more SEQ ID NOS as described herein. It shall be appreciated that certain sequence variability, extensions, and/or truncations of the disclosed sequences may result when combining sequences, as a result of, for example, case or efficiency in cloning (e.g., for creation of a restriction site).

[0269] In several embodiments, there is provided a polynucleotide encoding a Tumor Binder/CD8 alpha hinge/CD3 TM/4-1BB/NKp80 chimeric antigen receptor complex (see FIG. 5, CAR5c). The polynucleotide comprises or is composed of a Tumor Binder, a CD8a hinge, a CD3 transmembrane domain, a 4-1BB domain, and an NKp80 domain as described herein. In several embodiments, the polynucleotide further encodes mbIL15 (see FIG. 5, CAR5f). In several embodiments, this receptor complex is encoded by a nucleic acid molecule comprising a sequence obtained from a combination of sequences disclosed herein, or comprises an amino acid sequence obtained from a combination of sequences disclosed herein. In several embodiments, the encoding nucleic acid sequence, or the amino acid sequence, comprises a sequence in accordance with one or more SEQ ID NOS as described herein, such as those included herein as examples of constituent parts. In several embodiments, the encoding nucleic acid sequence, or the amino acid sequence, comprises a sequence that shares at least about 90%, at least about 94%, at least about 95%, at least about 96%, at least about 97%, at least about 98%, or at least about 99%, sequence identity, homology and/or functional equivalence with a sequence resulting from the combination one or more SEQ ID NOS as described herein. It shall be appreciated that certain sequence variability, extensions, and/or truncations of the disclosed sequences may result when combining sequences, as a result of, for example, case or efficiency in cloning (e.g., for creation of a restriction site).

[0270] In several embodiments, there is provided a polynucleotide encoding a Tumor Binder/CD8 alpha hinge/CD3 TM/CD16 intracellular domain/4-1BB chimeric antigen receptor complex (see FIG. 5, CAR5g). The polynucleotide comprises or is composed of a Tumor Binder, a CD8a hinge, a CD3 transmembrane domain, CD16 intracellular domain, and a 4-1BB domain as described herein. In several embodiments, the polynucleotide further encodes mbIL15 (see FIG. 5, CAR5h). In several embodiments, this receptor complex is encoded by a nucleic acid molecule comprising a sequence obtained from a combination of sequences disclosed herein, or comprises an amino acid sequence obtained from a combination of sequences disclosed herein. In several embodiments, the encoding nucleic acid sequence, or the amino acid sequence, comprises a sequence in accordance with one or more SEQ ID NOS as described herein, such as those included herein as examples of constituent parts. In several embodiments, the encoding nucleic acid sequence, or the amino acid sequence, comprises a sequence that shares at least about 90%, at least about 94%, at least about 95%, at least about 96%, at least about 97%, at least about 98%, or at least about 99%, sequence identity, homology and/or functional equivalence with a sequence resulting from the combination one or more SEQ ID NOS as described herein. It shall be appreciated that certain sequence variability, extensions, and/or truncations of the disclosed sequences may result when combining sequences, as a result of, for example, case or efficiency in cloning (e.g., for creation of a restriction site).

[0271] In several embodiments, there is provided a polynucleotide encoding a Tumor Binder/NKG2D Extracellular Domain/CD8hinge-CD8TM/OX40/CD3zeta chimeric antigen receptor complex (see FIG. 5, Bi-spec CAR/ACRa). The polynucleotide comprises or is composed of a Tumor Binder, an NKG2D extracellular domain (either full length or a fragment), a CD8a hinge, a CD8a transmembrane domain, an OX40 domain, and a CD3zeta domain as described herein. In several embodiments, the polynucleotide further encodes mbIL15 (see FIG. 5, Bi-Spec CAR/ACRb). In several embodiments, this receptor complex is encoded by a nucleic acid molecule comprising a sequence obtained from a combination of sequences disclosed herein, or comprises an amino acid sequence obtained from a combination of sequences disclosed herein. In several embodiments, the encoding nucleic acid sequence, or the amino acid sequence, comprises a sequence in accordance with one or more SEQ ID NOS as described herein, such as those included herein as examples of constituent parts. In several embodiments, the encoding nucleic acid sequence, or the amino acid sequence, comprises a sequence that shares at least about 90%, at least about 94%, at least about 95%, at least about 96%, at least about 97%, at least about 98%, or at least about 99%, sequence identity, homology and/or functional equivalence with a sequence resulting from the combination one or more SEQ ID NOS as described herein. It shall be appreciated that certain sequence variability, extensions, and/or truncations of the disclosed sequences may result when combining sequences, as a result of, for example, case or efficiency in cloning (e.g., for creation of a restriction site).

[0272] In several embodiments, there is provided a polynucleotide encoding an anti-CD70 binding domain/CD8a hinge/CD8a transmembrane domain/OX40/CD3zeta chimeric antigen receptor complex (see FIG. 6, CD70 CARa). The polynucleotide comprises or is composed of an anti-CD70 binding domain, a CD8alpha hinge, a CD8a transmembrane domain, an OX40 domain, and a CD3zeta domain as described herein. In several embodiments, the polynucleotide further encodes mbIL15 (see FIG. 6, CD70CARb). In several embodiments, this anti-CD70 binding domain comprises an scFv. In several embodiments, the anti-CD70 scFv is encoded by a nucleic acid molecule having a sequence according to any one of SEQ ID NOS: 38-111. In several embodiments, the anti-CD70 scFv is encoded by a nucleic acid sequence that shares at least about 80%, at least about 85%, at least about 90%, at least about 95%, at least about 96%, at least about 97%, at least about 98%, or at least about 99%, sequence identity, homology and/or functional equivalence with any one of SEQ ID NOS: 38-111. In several embodiments, the scFv comprises an amino acid having at least about 80%, at least about 85%, at least about 90%, at least about 95%, at least about 96%, at least about 97%, at least about 98%, or at least about 99%, sequence identity, homology and/or functional equivalence with any one of SEQ ID NOS: 230-303. In several embodiments, an anti-CD70 CAR is encoded by a nucleic acid sequence that shares at least about 80%, at least about 85%, at least about 90%, at least about 95%, at least about 96%, at least about 97%, at least about 98%, or at least about 99%, sequence identity, homology and/or functional equivalence with any one of SEQ ID NOS: 138-211 or a portion thereof (e.g. a portion excluding the mbIL15 sequence and/or self-cleaving peptide sequence). In several embodiments, the anti-CD70 CAR comprises an amino acid sequence having at least about 80%, at least about 85%, at least about 90%, at least about 95%, at least about 96%, at least about 97%, at least about 98%, or at least about 99%, sequence identity, homology and/or functional equivalence with any one of SEQ ID NOS: 313-395, or a portion thereof (e.g. a portion excluding the mbIL15 sequence and/or self-cleaving peptide sequence).

[0273] In some embodiments of the CARs disclosed herein, the CAR comprises at least two anti-CD70 binding domains and the CAR is a multivalent CAR. In some embodiments, the multivalent CAR comprises two anti-CD70 binding domains and the CAR is a bivalent CAR.

[0274] In some embodiments, the bivalent CAR comprises a first anti-CD70 binding domain and a second anti-CD70 binding domain. In some embodiments, the first anti-CD70 binding domain and the second anti-CD70 binding domain are any one of the anti-CD70 binding domains disclosed herein. In some embodiments, the first anti-CD70 binding domain and the second anti-CD70 binding domain each comprise a heavy chain variable region and a light chain variable region disclosed herein. In some embodiments, the first anti-CD70 binding domain and the second anti-CD70 binding domain each comprise: a) a heavy chain variable region comprising the sequence of SEQ ID NO: 923 and a light chain variable region comprising the sequence of SEQ ID NO: 997; b) a heavy chain variable region comprising the sequence of SEQ ID NO: 949 and a light chain variable region comprising the sequence of SEQ ID NO: 1023; c) a heavy chain variable region comprising the sequence of SEQ ID NO: 950 and a light chain variable region comprising the sequence of SEQ ID NO: 1024; d) a heavy chain variable region comprising the sequence of SEQ ID NO: 952 and a light chain variable region comprising the sequence of SEQ ID NO: 1026; or e) a heavy chain variable region comprising the sequence of SEQ ID NO: 953 and a light chain variable region comprising the sequence of SEQ ID NO: 1027.

[0275] In several embodiments, there is provided a polynucleotide encoding a bi-specific anti-CD70 binding domain/CD8a hinge/CD8a transmembrane domain/OX40/CD3zeta chimeric antigen receptor complex (see FIG. 6, Bi-V CD70 CARa). The polynucleotide comprises or is composed of a first and a second anti-CD70 binding domain, a CD8alpha hinge, a CD8a transmembrane domain, an OX40 domain, and a CD3zeta domain as described herein. In several embodiments, the polynucleotide further encodes mbIL15 (see FIG. 6, Bi-V CD70CARb). In several embodiments, the first and/or the second anti-CD70 binding domain comprise an scFv. In several embodiments the first and the second anti-CD70 scFv are the same, while in some embodiments the first and the second anti-CD70 scFv are different sequences. In several embodiments, the bi-specific anti-CD70 scFv is encoded by a nucleic acid molecule having a sequence according to any one of SEQ ID NOS: 112-120, and/or 221-229. In several embodiments, the anti-CD70 scFv is encoded by a nucleic acid sequence that shares at least about 80%, at least about 85%, at least about 90%, at least about 95%, at least about 96%, at least about 97%, at least about 98%, or at least about 99%, sequence identity, homology and/or functional equivalence with any one of SEQ ID NOS: 112-120, and/or 221-229. In several embodiments, the bispecific scFv comprises an amino acid having at least about 80%, at least about 85%, at least about 90%, at least about 95%, at least about 96%, at least about 97%, at least about 98%, or at least about 99%, sequence identity, homology and/or functional equivalence with any one of SEQ ID NOS: 304-312, 890-963, and/or 964-1037. In several embodiments, a bispecific anti-CD70 CAR is encoded by a nucleic acid sequence that shares at least about 80%, at least about 85%, at least about 90%, at least about 95%, at least about 96%, at least about 97%, at least about 98%, or at least about 99%, sequence identity, homology and/or functional equivalence with any one of SEQ ID NOS: 212-220, or codon-optimized SEQ ID NOs: 221-229. In several embodiments, the bispecific CAR comprises an amino acid sequence having at least about 80%, at least about 85%, at least about 90%, at least about 95%, at least about 96%, at least about 97%, at least about 98%, or at least about 99%, sequence identity, homology and/or functional equivalence with any one of SEQ ID NOS: 387-395, or a portion thereof (e.g. a portion excluding the mbIL15 sequence and/or self-cleaving peptide sequence).

[0276] In several embodiments, there is provided a polynucleotide encoding an anti-CD70 scFv/CD8a hinge/CD8a transmembrane domain/OX40/CD3zeta chimeric antigen receptor complex (see FIG. 6, NK71). The polynucleotide comprises or is composed of an anti CD70 scFv encoded by a nucleic acid sequence that shares at least about 80%, at least about 85%, at least about 90%, at least about 95%, at least about 96%, at least about 97%, at least about 98%, or at least about 99%, sequence identity, homology and/or functional equivalence with SEQ ID NO: 36, a CD8alpha hinge, a CD8a transmembrane domain, an OX40 domain, and a CD3zeta domain as described herein. In several embodiments, the polynucleotide further encodes mbIL15. In several embodiments, there is provided a polynucleotide encoding an anti CD70 scFv/CD8a hinge/CD8a transmembrane domain/OX40/CD3zeta chimeric antigen receptor complex (see FIG. 6, NK72). The polynucleotide comprises or is composed of an anti CD70 scFv encoded by a nucleic acid sequence that shares at least about 80%, at least about 85%, at least about 90%, at least about 95%, at least about 96%, at least about 97%, at least about 98%, or at least about 99%, sequence identity, homology and/or functional equivalence with SEQ ID NO: 37, a CD8alpha hinge, a CD8a transmembrane domain, an OX40 domain, and a CD3zeta domain as described herein. In several embodiments, the polynucleotide further encodes mbIL15. However, in several embodiments, the anti-CD70 CARs disclosed herein do not comprise the scFv of SEQ ID NO: 36 or 37.

[0277] In several embodiments, there is provided a polynucleotide encoding an CD19/CD8a hinge/CD8a transmembrane domain/OX40/CD3zeta activating chimeric receptor complex (see FIG. 7, CD19 CARa). The polynucleotide comprises or is composed of an anti-CD19 scFv, a CD8alpha hinge, a CD8a transmembrane domain, an OX40 domain, and a CD3zeta domain as described herein. Additionally, in several embodiments, the polynucleotide encoding this CAR construct can optionally further encode mbIL15 (FIG. 7, CD19 CARb). In several embodiments, this receptor complex (including mbIL15) is encoded by a nucleic acid molecule comprising the nucleic acid sequence of SEQ ID NO: 34. In yet another embodiment, this chimeric receptor is encoded by the amino acid sequence of SEQ ID NO: 35. In some embodiments, the sequence of the chimeric receptor may vary from SEQ ID NO: 34 or 35, but remains, depending on the embodiment, at least 70%, at least 75%, at least 80%, at least 85%, at least 90%, or at least 95% identical with SEQ ID NO: 34 or 35. In several embodiments, while the chimeric receptor may vary from SEQ ID NO: 34 or 35, the chimeric receptor retains, or in some embodiments, has enhanced, NK cell activating and/or cytotoxic function. Additional information about chimeric receptors for use in the presently disclosed methods and compositions can be found in PCT Patent Application No. PCT/US2020/020824, filed Mar. 3, 2020, which is incorporated in its entirety by reference herein.

[0278] In several embodiments, there is provided a polynucleotide encoding an NKG2D/CD8a hinge/CD8a transmembrane domain/OX40/CD3zeta activating chimeric receptor complex (see FIG. 7, NKG2D ACRa). The polynucleotide comprises or is composed of a fragment of the NKG2D receptor capable of binding a ligand of the NKG2D receptor, a CD8alpha hinge, a CD8a transmembrane domain, an OX40 domain, and a CD3zeta domain as described herein. In several embodiments, this receptor complex is encoded by a nucleic acid molecule comprising the nucleic acid sequence of SEQ ID NO: 32. In yet another embodiment, this chimeric receptor is encoded by the amino acid sequence of SEQ ID NO: 33. In some embodiments, the sequence of the chimeric receptor may vary from SEQ ID NO: 32 or 33, but remains, depending on the embodiment, at least 70%, at least 75%, at least 80%, at least 85%, at least 90%, or at least 95% identical to SEQ ID NO: 32 or 33. In several embodiments, while the chimeric receptor may vary from SEQ ID NO: 32 or 33, the chimeric receptor retains, or in some embodiments, has enhanced, NK cell activating and/or cytotoxic function. Additionally, in several embodiments, this construct can optionally be co-expressed with mbIL15, such as the mbIL15 encoded by SEQ ID NO: 1188 (FIG. 7, NKG2D ACRb). Additional information about chimeric receptors for use in the presently disclosed methods and compositions can be found in PCT Patent Publication No. WO 2018/183385, filed Mar. 27, 2018, which is incorporated in its entirety by reference herein.

[0279] In several embodiments, there is provided a population of genetically engineered natural killer cells for cancer immunotherapy. In some embodiments, the population comprises a plurality of NK cells that have been expanded in culture. In some embodiments, at least a portion of the plurality of NK cells is engineered to express a chimeric antigen receptor comprising a tumor binding domain, a transmembrane domain, and a cytotoxic signaling complex. In some embodiments, the tumor binding domain targets CD70 and is encoded by a polynucleotide comprising a sequence having at least 85%, at least 90%, or at least 95% sequence identity to SEQ ID NO: 36 or 37. In some embodiments, the tumor binding domain targets CD70 and comprises an amino acid sequence having at least 85%, at least 90%, or at least 95% or greater sequence identity to SEQ ID NO: 1186 or 1187. In some embodiments, the NK cells are genetically edited to express reduced levels of CD70 as compared to a non-edited NK cell that has been expanded in culture. In some embodiments, the reduced CD70 expression was engineered through editing of an endogenous CD70 gene. In some embodiments, the NK cells are further genetically edited to express reduced levels of a CIS protein encoded by a CISH gene as compared to a non-engineered NK cell. In some embodiments, the reduced CIS expression was engineered through editing of a CISH gene. In some embodiments, the genetically engineered NK cells exhibit one or more of enhanced expansion capability, enhanced cytotoxicity against target cells, and enhanced persistence, as compared to NK cells expressing native levels of CIS. In some embodiments, the NK cells are further genetically edited to express reduced levels of an adenosine receptor. In some embodiments, the reduced adenosine receptor expression was achieved through editing of a gene encoding said adenosine receptor. In some embodiments, the genetically engineered NK cells exhibit one or more of enhanced expansion capability, enhanced cytotoxicity against target cells and enhanced persistence, as compared to NK cells expressing native levels of the adenosine receptor.

[0280] Also disclosed herein are cells comprising any one of the anti-CD70 binding domains disclosed herein and/or any one of the CARs disclosed herein. In some embodiments, the cell is an immune cell. In some embodiments, the cell is an NK cell or a T cell. In some embodiments, the cell is genetically edited to express a reduced level of CISH, an adenosine receptor, A2A adenosine receptor, A2B adenosine receptor, A3 adenosine receptor, A1 adenosine receptor, A2AR, TGFBR, B2M, CIITA, NKG2A, CBLB, TRIM29, SOCS2, SMAD3, MAPKAPK3, CEACAM1, or DDIT4, or any combination thereof, as compared to a non-engineered cell. In some embodiments, the cell is genetically edited with one or more guide RNAs having at least 95% sequence identity to SEQ ID NOs: 1190-1201. Unless indicated otherwise to the contrary, the sequences provided for guide RNAs that are recited using deoxyribonucleotides refer to the target DNA and shall be considered as also referencing those guides used in practice (e.g., employing ribonucleotides, where the ribonucleotide uracil is used in lieu of deoxyribonucleotide thymine or vice-versa where thymine is used in lieu of uracil, wherein both are complementary base pairs to adenine when reciting either an RNA or DNA sequence). For example, a gRNA with the sequence TCACCAAGCCCGCGACCAATGGG (SEQ ID NO: 121) shall also refer to the following sequence UCACCAAGCCCGCGACCAAUGGG (SEQ ID NO: 1214) or a gRNA with sequence UCACCAAGCCCGCGACCAAUGGG (SEQ ID NO: 1214) shall also refer to the following sequence TCACCAAGCCCGCGACCAATGGG (SEQ ID NO: 121).

### Methods of Treatment

[0281] Some embodiments relate to a method of treating, ameliorating, inhibiting, or preventing cancer with a cell or immune cell comprising a chimeric antigen receptor and/or an activating chimeric receptor, as disclosed herein. In some embodiments, the method includes treating or preventing cancer. In some embodiments, the method includes administering a therapeutically effective amount of immune cells expressing a tumor-directed chimeric antigen receptor and/or tumor-directed chimeric receptor as described herein. Examples of types of cancer that may be treated as such are described herein.

[0282] Disclosed herein are methods of treating cancer in a subject. In some embodiments, the methods comprise administering to the subject any one of the anti-CD70 binding domains disclosed herein, any one of the CARs disclosed herein, or any one of the cells disclosed herein, or any combination thereof.

[0283] In certain embodiments, treatment of a subject with a genetically engineered cell(s) described herein achieves one, two, three, four, or more of the following effects, including, for example: (i) reduction or amelioration the severity of disease or symptom associated therewith; (ii) reduction in the duration of a symptom associated with a disease; (iii) protection against the progression of a disease or symptom associated therewith; (iv) regression of a disease or symptom associated therewith; (v) protection against the development or onset of a symptom associated with a disease; (vi) protection against the recurrence of a symptom associated with a disease; (vii) reduction in the hospitalization of a subject; (viii) reduction in the hospitalization length; (ix) an increase in the survival of a subject with a disease; (x) a reduction in the number of symptoms associated with a disease; (xi) an enhancement, improvement, supplementation, complementation, or augmentation of the prophylactic or therapeutic effect(s) of another therapy. Advantageously, the non-alloreactive engineered T cells disclosed herein further enhance one or more of the above. Administration can be by a variety of routes, including, without limitation, intravenous, intra-arterial, subcutaneous, intramuscular, intrahepatic, intraperitoneal and/or local delivery to an affected tissue.

[0284] Also disclosed herein are uses of any one of the anti-CD70 binding domains disclosed herein, any one of the CARs disclosed herein, any one of the cells disclosed herein, or any combination thereof for the treatment of cancer.

[0285] Also disclosed herein are uses of any one of the anti-CD70 binding domains disclosed herein, any one of the CARs disclosed herein, any one of the cells disclosed herein, or any combination thereof in the manufacture of a medicament for the treatment of cancer.

### Administration and Dosing

[0286] Further provided herein are methods of treating a subject having cancer, comprising administering to the subject a composition comprising immune cells (such as NK and/or T cells) engineered to express a cytotoxic receptor complex as disclosed herein. For example, some embodiments of the compositions and methods described herein relate to use of a tumor-directed chimeric antigen receptor and/or tumor-directed chimeric receptor, or use of cells expressing a tumor-directed chimeric antigen receptor and/or tumor-directed chimeric receptor, for treating a cancer patient. Uses of such engineered immune cells for treating cancer are also provided.

[0287] In certain embodiments, treatment of a subject with a genetically engineered cell(s) described herein achieves one, two, three, four, or more of the following effects, including, for example: (i) reduction or amelioration the severity of disease or symptom associated therewith; (ii) reduction in the duration of a symptom associated with a disease; (iii) protection against the progression of a disease or symptom associated therewith; (iv) regression of a disease or symptom associated therewith; (v) protection against the development or onset of a symptom associated with a disease; (vi) protection against the recurrence of a symptom associated with a disease; (vii) reduction in the hospitalization of a subject; (viii) reduction in the hospitalization length; (ix) an increase in the survival of a subject with a disease; (x) a reduction in the number of symptoms associated with a disease; (xi) an enhancement, improvement, supplementation, complementation, or augmentation of the prophylactic or therapeutic effect(s) of another therapy. Each of these comparisons are versus, for example, a different therapy for a disease, which includes a cell-based immunotherapy for a disease using cells that do not express the constructs disclosed herein. Advantageously, the non-alloreactive engineered T cells disclosed herein further enhance one or more of the above.

[0288] Administration can be by a variety of routes, including, without limitation, intravenous, intra-arterial, subcutaneous, intramuscular, intrahepatic, intraperitoneal and/or local delivery to an affected tissue. Doses of immune cells such as NK and/or T cells can be readily determined for a given subject based on their body mass, disease type and state, and desired aggressiveness of treatment, but range, depending on the embodiments, from about 10⁵ cells per kg to about 10¹² cells per kg (e.g., 10⁵-10⁷, 10⁷-10¹⁰, 10¹⁰-10¹² and overlapping ranges therein). In one embodiment, a dose escalation regimen is used. In several embodiments, a range of immune cells such as NK and/or T cells is administered, for example between about 1×10⁶ cells/kg to about 1×10⁸ cells/kg. Depending on the embodiment, various types of cancer can be treated. In several embodiments, hepatocellular carcinoma is treated. Additional embodiments provided for herein include treatment or prevention of the following non-limiting examples of cancers including, but not limited to, acute lymphoblastic leukemia (ALL), acute myeloid leukemia (AML), adrenocortical carcinoma, Kaposi sarcoma, lymphoma, gastrointestinal cancer, appendix cancer, central nervous system cancer, basal cell carcinoma, bile duct cancer, bladder cancer, bone cancer, brain tumors (including but not limited to astrocytomas, spinal cord tumors, brain stem glioma, glioblastoma, craniopharyngioma, ependymoblastoma, ependymoma, medulloblastoma, medulloepithelioma), breast cancer, bronchial tumors, Burkitt lymphoma, cervical cancer, colon cancer, chronic lymphocytic leukemia (CLL), chronic myelogenous leukemia (CML), chronic myeloproliferative disorders, ductal carcinoma, endometrial cancer, esophageal cancer, gastric cancer, Hodgkin lymphoma, non-Hodgkin lymphoma, hairy cell leukemia, renal cell cancer, leukemia, oral cancer, nasopharyngeal cancer, liver cancer, lung cancer (including but not limited to, non-small cell lung cancer, (NSCLC) and small cell lung cancer), pancreatic cancer, bowel cancer, lymphoma, melanoma, ocular cancer, ovarian cancer, pancreatic cancer, prostate cancer, pituitary cancer, uterine cancer, and vaginal cancer.

[0289] In some embodiments, also provided herein are nucleic acid and amino acid sequences that have sequence identity and/or homology of at least 80%, 85%, 90%, 95%, 96%, 97%, 98%, 99% (and ranges therein) as compared with the respective nucleic acid or amino acid sequences of SEQ ID NOS. 1-398 (or combinations of two or more of SEQ ID NOS: 1-398) and that also exhibit one or more of the functions as compared with the respective SEQ ID NOS. 1-398 (or combinations of two or more of SEQ ID NOS: 1-398) including but not limited to, (i) enhanced proliferation, (ii) enhanced activation, (iii) enhanced cytotoxic activity against cells presenting ligands to which NK cells harboring receptors encoded by the nucleic acid and amino acid sequences bind, (iv) enhanced homing to tumor or infected sites, (v) reduced off target cytotoxic effects, (vi) enhanced secretion of immunostimulatory cytokines and chemokines (including, but not limited to IFNg, TNFa, IL-22, CCL3, CCL4, and CCL5), (vii) enhanced ability to stimulate further innate and adaptive immune responses, and (viii) combinations thereof.

[0290] Additionally, in several embodiments, there are provided amino acid sequences that correspond to any of the nucleic acids disclosed herein, while accounting for degeneracy of the nucleic acid code. Furthermore, those sequences (whether nucleic acid or amino acid) that vary from those expressly disclosed herein, but have functional similarity or equivalency are also contemplated within the scope of the present disclosure. The foregoing includes mutants, truncations, substitutions, or other types of modifications.

[0291] In several embodiments, polynucleotides encoding the disclosed cytotoxic receptor complexes are mRNA. In some embodiments, the polynucleotide is DNA. In some embodiments, the polynucleotide is operably linked to at least one regulatory element for the expression of the cytotoxic receptor complex.

[0292] Additionally provided, according to several embodiments, is a vector comprising the polynucleotide encoding any of the polynucleotides provided for herein, wherein the polynucleotides are optionally operatively linked to at least one regulatory element for expression of a cytotoxic receptor complex. In several embodiments, the vector is a retrovirus.

[0293] Further provided herein are engineered immune cells (such as NK and/or T cells) comprising the polynucleotide, vector, or cytotoxic receptor complexes as disclosed herein. Further provided herein are compositions comprising a mixture of engineered immune cells (such as NK cells and/or engineered T cells), each population comprising the polynucleotide, vector, or cytotoxic receptor complexes as disclosed herein. Additionally, there are provided herein compositions comprising a mixture of engineered immune cells (such as NK cells and/or engineered T cells), each population comprising the polynucleotide, vector, or cytotoxic receptor complexes as disclosed herein and the T cell population having been genetically modified to reduce/eliminate gvHD and/or HvD. In some embodiments, the NK cells and the T cells are from the same donor. In some embodiments, the NK cells and the T cells are from different donors. In several embodiments, one or more genes are edited (e.g., knockout or knock in) in order to impart one or more enhanced functions or characteristics to the edited cells. For example, in several embodiments CIS protein is substantially reduced by editing the CISH, which leads to enhanced NK cell proliferation, cytotoxicity and/or persistence.

[0294] Doses of immune cells such as NK cells or T cells can be readily determined for a given subject based on their body mass, disease type and state, and desired aggressiveness of treatment, but range, depending on the embodiments, from about 10⁵ cells per kg to about 10¹² cells per kg (e.g., 10⁵-10⁷, 10⁷-10¹⁰, 10¹⁰-10¹² and overlapping ranges therein). In one embodiment, a dose escalation regimen is used. In several embodiments, a range of NK cells is administered, for example between about 1×10⁶ cells/kg to about 1×10⁸ cells/kg. Depending on the embodiment, various types of cancer or infection disease can be treated.

### Cancer Types

[0295] Some embodiments of the compositions and methods described herein relate to administering immune cells comprising a tumor-directed chimeric antigen receptor and/or tumor-directed chimeric receptor to a subject with cancer. Various embodiments provided for herein include treatment or prevention of the following non-limiting examples of cancers. Examples of cancer include, but are not limited to, acute lymphoblastic leukemia (ALL), acute myeloid leukemia (AML), adrenocortical carcinoma, Kaposi sarcoma, lymphoma, gastrointestinal cancer, appendix cancer, central nervous system cancer, basal cell carcinoma, bile duct cancer, bladder cancer, bone cancer, brain tumors (including but not limited to astrocytomas, spinal cord tumors, brain stem glioma, craniopharyngioma, ependymoblastoma, ependymoma, medulloblastoma, medulloepithelioma), breast cancer, bronchial tumors, Burkitt lymphoma, cervical cancer, colon cancer, chronic lymphocytic leukemia (CLL), chronic myelogenous leukemia (CML), chronic myeloproliferative disorders, ductal carcinoma, endometrial cancer, esophageal cancer, gastric cancer, Hodgkin lymphoma, non-Hodgkin lymphoma, hairy cell leukemia, renal cell cancer, leukemia, oral cancer, nasopharyngeal cancer, liver cancer, lung cancer (including but not limited to, non-small cell lung cancer, (NSCLC) and small cell lung cancer), pancreatic cancer, bowel cancer, lymphoma, melanoma, ocular cancer, ovarian cancer, pancreatic cancer, prostate cancer, pituitary cancer, uterine cancer, and vaginal cancer.

### Cancer Targets

[0296] Some embodiments of the compositions and methods described herein relate to immune cells comprising a chimeric receptor that targets a cancer antigen. Non-limiting examples of target antigens include: CD70, CD5, CD19; CD123; CD22; CD30; CD171; CS1 (also referred to as CD2 subset 1, CRACC, SLAMF7, CD319, and 19A24); TNF receptor family member B cell maturation (BCMA); CD38; DLL3; G protein coupled receptor class C group 5, member D (GPRC5D); epidermal growth factor receptor (EGFR) CD138; prostate-specific membrane antigen (PSMA); Fms Like Tyrosine Kinase 3 (FLT3); KREMEN2 (Kringle Containing Transmembrane Protein 2), ALPPL2, Claudin 4, Claudin 6, C-type lectin-like molecule-1 (CLL-1 or CLECL1); CD33; epidermal growth factor receptor variant III (EGFRviii); ganglioside G2 (GD2); ganglioside GD3 (aNcu5Ac(2-8)aNcu5Ac(2-3)bDGalp(1-4)bDGlcp(1-1)Cer);); Tn antigen ((Tn Ag) or (GalNAca-Ser/Thr)); prostate-specific membrane antigen (PSMA); Receptor tyrosine kinase-like orphan receptor 1 (ROR1); Fms Like Tyrosine Kinase 3 (FLT3); Tumor-associated glycoprotein 72 (TAG72); CD38; CD44v6; a glycosylated CD43 epitope expressed on acute leukemia or lymphoma but not on hematopoietic progenitors, a glycosylated CD43 epitope expressed on non-hematopoietic cancers, Carcinoembryonic antigen (CEA); Epithelial cell adhesion molecule (EPCAM); B7H3 (CD276); KIT (CD117); Interleukin-13 receptor subunit alpha-2 (IL-13Ra2 or CD213A2); Mesothelin; Interleukin 11 receptor alpha (IL-llRa); prostate stem cell antigen (PSCA); Protease Serine 21 (Testisin or PRSS21); vascular endothelial growth factor receptor 2 (VEGFR2); Lewis (Y) antigen; CD24; Platelet-derived growth factor receptor beta (PDGFR-beta); Stage-specific embryonic antigen-4 (SSEA-4); CD20; Folate receptor alpha (FRa or FR1); Folate receptor beta (FRb); Receptor tyrosine-protein kinase ERBB2 (Her2/neu); Mucin 1, cell surface associated (MUC1); epidermal growth factor receptor (EGFR); neural cell adhesion molecule (NCAM); Prostase; prostatic acid phosphatase (PAP); elongation factor 2 mutated (ELF2M); Ephrin B2; fibroblast activation protein alpha (FAP); insulin-like growth factor 1 receptor (IGF-I receptor), carbonic anhydrase IX (CAIX); Proteasome (Prosome, Macropain) Subunit, Beta Type, 9 (LMP2); glycoprotein 100 (gp100); oncogene fusion protein consisting of breakpoint cluster region (BCR) and Abelson murine leukemia viral oncogene homolog 1 (Abl) (bcr-abl); tyrosinase; ephrin type-A receptor 2 (EphA2); sialyl Lewis adhesion molecule (sLe); ganglioside GM3 (aNeu5Ac(2-3)bDClalp(1-4)bDGlcp(1-1)Cer); transglutaminase 5 (TGS5); high molecular weight-melanoma associated antigen (HMWMAA); o-acetyl-GD2 ganglioside (OAcGD2); tumor endothelial marker 1 (TEM1/CD248); tumor endothelial marker 7-related (TEM7R); claudin 6 (CLDN6); thyroid stimulating hormone receptor (TSHR); G protein coupled receptor class C group 5, member D (GPRC5D); chromosome X open reading frame 61 (CXORF61); CD97; CD179a; anaplastic lymphoma kinase (ALK); Polysialic acid; placenta-specific 1 (PLAC1); hexasaccharide portion of globoH glycoceramide (GloboH); mammary gland differentiation antigen (NY-BR-1); uroplakin 2 (UPK2); Hepatitis A virus cellular receptor 1 (HAVCR1); adrenoceptor beta 3 (ADRB3); pannexin 3 (PANX3); G protein-coupled receptor 20 (GPR20); lymphocyte antigen 6 complex, locus K 9 (LY6K); Olfactory receptor 51E2 (OR51E2); TCR Gamma Alternate Reading Frame Protein (TARP); Wilms tumor protein (WT1); Cancer/testis antigen 1 (NY-ES0-1); Cancer/testis antigen 2 (LAGE-1a); Melanoma-associated antigen 1 (MAGE-A1); ETS translocation-variant gene 6, located on chromosome 12p (ETV6-AML); sperm protein 17 (SPA17); X Antigen Family, Member 1A (XAGE1); angiopoietin-binding cell surface receptor 2 (Tie 2); melanoma cancer testis antigen-1 (MAD-CT-1); melanoma cancer testis antigen-2 (MAD-CT-2); Fos-related antigen 1; tumor protein p53 (p53); p53 mutant; prostein; survivin; telomerase; prostate carcinoma tumor antigen-1 (PCT A-1 or Galectin 8), melanoma antigen recognized by T cells 1 (MelanA or MARTI); Rat sarcoma (Ras) mutant; human Telomerase; reverse transcriptase (hTERT); sarcoma translocation breakpoints; melanoma inhibitor of apoptosis (ML-IAP); ERG (transmembrane protease, serine 2 (TMPRSS2) ETS fusion gene); N-Acetyl glucosaminyl-transferase V (NA17); paired box protein Pax-3 (PAX3); Androgen receptor; Cyclin B1; v-myc avian myelocytomatosis viral oncogene neuroblastoma derived homolog (MYCN); Ras Homolog Family Member C (RhoC); Tyrosinase-related protein 2 (TRP-2); Cytochrome P450 IB 1 (CYPIB 1); CCCTC-Binding Factor (Zinc Finger Protein)-Like (BORIS or Brother of the Regulator of Imprinted Sites), Squamous Cell Carcinoma Antigen Recognized By T Cells 3 (SART3); Paired box protein Pax-5 (PAX5); proacrosin binding protein sp32 (OY-TES1); lymphocyte-specific protein tyrosine kinase (LCK); A kinase anchor protein 4 (AKAP-4); synovial sarcoma, X breakpoint 2 (SSX2); Receptor for Advanced Gly cation Endproducts (RAGE-1); renal ubiquitous 1 (RUI); renal ubiquitous 2 (RU2); legumain; human papilloma virus E6 (HPV E6); human papilloma virus E7 (HPV E7); intestinal carboxyl esterase; heat shock protein 70-2 mutated (mut hsp70-2); CD79a; CD79b; CD72; Leukocyte-associated immunoglobulin-like receptor 1 (LAIR1); Fc fragment of IgA receptor (FCAR or CD89); Leukocyte immunoglobulin-like receptor subfamily A member 2 (LILRA2); CD300 molecule-like family member f (CD300LF); C-type lectin domain family 12 member A (CLEC12A); bone marrow stromal cell antigen 2 (BST2); EGF-like module-containing mucin-like hormone receptor-like 2 (EMR2); lymphocyte antigen 75 (LY75); Glypican-3 (GPC3); Fc receptor-like 5 (FCRL5); and immunoglobulin lambda-like polypeptide 1 (IGLL1), MPL, Biotin, c-MYC epitope Tag, CD34, LAMP1 TROP2, GFRalpha4, CDH17, CDH6, NYBR1, CDH19, CD200R, Slea (CA19.9; Sialyl Lewis Antigen); Fucosyl-GMl, PTK7, gpNMB, CDH1-CD324, DLL3, CD276/B7H3, ILI IRa, IL13Ra2, CD179b-IGLll, TCRgamma-delta, NKG2D, CD32 (FCGR2A), Tn ag, Timl-/HVCR1, CSF2RA (GM-CSFR-alpha), TGFbetaR2, Lews Ag, TCR-beta1 chain, TCR-beta2 chain, TCR-gamma chain, TCR-delta chain, FITC, Leutenizing hormone receptor (LHR), Follicle stimulating hormone receptor (FSHR), Gonadotropin Hormone receptor (CGHR or GR), CCR4, GD3, SLAMF6, SLAMF4, HIV1 envelope glycoprotein, HTLVl-Tax, CMV pp65, EBV-EBNA3c, KSHV K8.1, KSHV-gH, influenza A hemagglutinin (HA), GAD, PDL1, Guanylyl cyclase C (GCC), auto antibody to desmoglein 3 (Dsg3), auto antibody to desmoglein 1 (Dsg1), HLA, HLA-A, HLA-A2, HLA-B, HLA-C, HLA-DP, HLA-DM, HLA-DOA, HLA-DOB, HLA-DQ, HLA-DR, HLA-G, IgE, CD99, Ras G12V, Tissue Factor 1 (TF1), AFP, GPRC5D, Claudin1 8.2 (CLD18A2 or CLDN18A.2)), P-glycoprotein, STEAP1, Liv1, Nectin-4, Cripto, gpA33, BST1/CD157, low conductance chloride channel, and the antigen recognized by TNT antibody.

### EXAMPLES

[0297] The following are non-limiting descriptions of experimental methods and materials that were used in examples disclosed below.

### Example 1—CD70 Gene Editing to Reduce Expression by NK Cells

[0298] As discussed in more detail herein, certain cancer types express selected markers in an elevated manner. In several embodiments, CAR constructs are generated according to sequences disclosed herein in order to specifically target a given cancer. One such non-limiting embodiment of a cancer marker targeted by constructs disclosed herein is CD70. While various types of cancer can be treated using the cells and methods disclosed herein, in several embodiments renal cell carcinoma (RCC) is treated. RCC accounts for 90-95% of neoplasms in the kidneys, and is one of the most common kidney cancers in adults. While the 5-year survival rate is 75%, this depends heavily on the type, cell type, and stage of the cancer when it is first diagnosed. For ˜⅔ of patients, RCC is only in the kidney (with the 5-year survival rate for these patients is 93%). However, if the kidney cancer has spread to surrounding tissues or organs and/or the regional lymph nodes, the 5-year survival rate is drops to 69%. Additionally, if the cancer has spread to a distant part of the body, the 5-year survival rate plummets to only 12%. Therapeutics to treat RCC and other CD70-expressing tumors are needed. Thus, as discussed in detail above, in several embodiments, anti-CD70 CAR constructs are provided. In several embodiments, the polynucleotides encoding those constructs are engineered to bi-cistronically express mbIL15. In several embodiments, however, in order to enhance the expansion, cytotoxicity and/or persistence of engineered immune cells (such as NK cells), the cells are subject to gene editing to enhance or disrupt expression of certain genes. In several embodiments, one such gene that is disrupted, knocked out in several embodiments, is CD70. In several embodiments, CD70 expression is disrupted (e.g., knocked out) in NK cells because NK cells naturally express relatively high levels of CD70, and if expression were maintained at native levels, an anti-CD70 CAR expressing NK cell would target not only a CD70-expressing tumor cell, but also other NK cells (whether native NK cells or those expressing the CD70 CAR). Thus, in several embodiments, gene editing is used to knockout CD70 expression by NK cells, such that engineered NK cells expressing an anti-CD70 CAR are not targeting the therapeutic NK cells as well as a CD70-expressing tumor.

[0299] To assess the expression of CD70 on native NK cell, FACS analysis was performed on donor NK cells after 9 days of expansion in culture. FIGS. 8A-8C show these data. FIG. 8A shows that nearly 98% of NK cells from this donor were positive for CD70. FIGS. 8B and 8C show isotype control staining and unstained NK cells. These data demonstrate that CD70 expression on expanded NK cells would cause an anti-CD70 CAR expressing NK cells to kill the NK cell population, essentially an NK cell suicide due to lack of differentiation between the CD70-expressing NK cells and CD70-expressing tumor cells. FIG. 9 demonstrates a non-limiting schematic of various embodiments of editing and engineering NK cells to effectively target CD70-expressing tumors and exhibit enhanced NK cell persistence. In several embodiments, gene editing is used to reduce, substantially reduce, or eliminate CD70 expression by NK cells. The NK cells are then engineered to express an anti-CD70 CAR, such as those utilizing one or more of the anti-CD70 binding domain or scFv disclosed herein. This process results in a CD70-targeting, non-CD70 expressing NK cell. While this process schematically depicts editing and engineering of NK cells, in several embodiments T cells are subjected to a corresponding process.

[0300] FIGS. 10A and 10B depict schematic process flow diagrams for gene editing of NK cells (or T cells). These non-limiting embodiments of gene editing processes reflect the use of a CRISPR-Cas system, however in several embodiments, other editing modalities are used. FIG. 10A shows a timeline for electroporation of NK cells on Day 0, followed by 5 days of culture in high IL-2 media. At Day 5, CD70 expression is assessed by FACS, followed by another 8 days of expansion of the NK cells in culture with feeder cells and low IL-2 media. CD70 expression is assessed again at Day 13. FIG. 10B shows another non-limiting approach in which NK cells are first expanded by co-culture with feeder cells and using low IL-2 media, followed by electroporation to introduce guide RNA at day 7, then culture in high IL-2 media for 5 additional days. CD70 expression is assessed at Day 7 and Day 11. Non-limiting examples of CD70 guide RNAs are shown below in Table 1.

TABLE 1
CD70 Guide RNAs

| SEQ | | |
|---|---|---|
| ID | | |
| NO: | Name | Sequence |
| 121 | CD70-1 | TCACCAAGCCCGCGACCAATGGG |
| 122 | CD70-2 | GCTTTGGTCCCATTGGTCGCGGG |
| 123 | CD70-3 | ACCCTCCTCCGGCATCGCCGCGG |

[0301] FIGS. 11A-11B show FACS analysis of CD70 expression from a first experiment (using the KD7 approach) and FIGS. 11C-11D show data from a second experiment (also using KD7). FIG. 11A shows CD70 expression for each of the three guide RNAs used, while FIG. 11B shows CD70 expression by native NK cells, an isotype control, and an unstained control. FIGS. 11C and 11D show corresponding data from the second experiment (different donor). While in several embodiments, use of a single guide RNA is sufficient to achieve a desired level of reduced gene/protein expression, given that CD70 expression by edited and engineered immune cells will cause a suicide effect, greater levels of reduction of CD70 were investigated.

[0302] As is used in several embodiments disclosed herein, the effect of use of single guide RNA versus a combination of guide RNAs was investigated. FIGS. 12A-12E relate to use of single guide RNAs 1, 2, and 3 (12A, 12B, and 12C, respectively). The NK cells in this experiment were edited/expanded with the KD7 method (expansion followed by editing). As shown, approximately 20-50% of the NK cells retained CD70 expression. FIGS. 12D and 12E are CD70 counts on non-electroporated NK cells and an unstained control. FIGS. 13A-13E show data for combinations of guide RNAs (again with KD7). FIG. 13A shows that CD70-1 and CD70-2 guide RNAs in combination reduce CD70 expression to ˜24% of NK cells. FIG. 13B shows that CD70-1 and CD70-3 guide RNAs in combination reduce CD70 expression further, to ˜13% of NK cells. FIG. 13C shows that CD70-2 and CD70-3 guide RNAs in combination reduce CD70 expression still further, to less than 13% of NK cells. FIGS. 13D and 13E repeat the control data of 12D/12E. These data show that, in accordance with several embodiments, significant reductions in CD70 expression can be accomplished through the use of a plurality of guide RNAs directed against a target gene, like CD70.

[0303] As schematically illustrated in FIG. 14F, provided for herein are various alternative methods for gene editing cells, such as NK cells or T cells. FIG. 14F shows a modified KD7 approach with donor cells being expanded for 7 days, electroporated at Day 7, cultured for 5 days to allow gene editing to occur (done in some embodiments in high IL2 media, followed by an additional 10 days of culture (done in some embodiments with low IL2 media). CD70 expression was analyzed by FACS at Day 21. FIGS. 14A-14E show data related to CD70 expression by NK cells using that approach. FIG. 14D shows CD70 expression on 96% of NK cells assessed, whereas FIG. 14E confirms limited background signal with an unstained population. FIGS. 14A, 14B, and 14C show reductions in CD70 expression by NK cells ranging from about 78% to nearly 97%.

[0304] FIGS. 15A-15E show FACS analysis data for NK cells where double guide RNAs where used to target CD70. FIGS. 15D and 15E repeat the control data of 14D/14E. FIG. 15A shows guide RNAs 1 and 2, which resulted in almost 80% knockdown of CD70 expression. FIG. 15B shows guide RNAs 1 and 3, which resulted in almost 97% knockdown of CD70 expression. FIG. 15C shows guide RNAs 2 and 3, which resulted in over 98% knockdown of CD70 expression. These data demonstrate that in some embodiments, use of a single guide RNA to edit a gene results in substantial decreases in expression of a target protein. However, in several embodiments, use of a plurality of guide RNAs to edit a gene can further reduce the expression of a target protein.

[0305] FIGS. 16A-16C show additional gene editing (here using the KD0 approach) on NK cells from two different donors, in order to further assess the effects of gene editing prior to expansion. FIG. 16A shows the knockdown of CD70 expression on NK cells from a first donor using three different guide RNAs (CD70-1, CD70-2, CD70-3, see Table 1). FIG. 16B shows results for NK cells of a second donor, while FIG. 16C shows control data (native, unexpanded NK cells, which express low levels of CD70). As can be seen from these data, as in accordance with several embodiments substantially all native CD70 expression was knocked out using various guide sets. At Day 5 post expansion, guide set 1, 2, and 3, reduced expressing of native CD70 by almost 99%, 98%, and 97%, respectively for a first donor (16A). Those guide RNAs achieved almost 98%, 99% and 97% (respectively) reduction of CD70 expression on NK cells of a second donor (16B). CD70 expression was assessed at Day 13 post-editing (8 days after the first assessment of CD70 expression. Of note is that the NK cells robustly expanded, in spite of the CD70 knockout, indicating that expansion of NK cells to clinically relevant numbers is possible, even with genetic editing. FIG. 17A shows the CD70 expression for a first donor, which even after an additional 8 days in culture, was still significantly reduced using guide set 1 and guide set 2 (approximately 70-80% using those gRNAs). The “recovery” of expression of CD70 is due to the expansion of NK cells in which CD70 was not knocked out or was only partially knocked down. The maintenance of CD70 expression at about 70-80% still represents a significant portion of the NK cell population that could avoid the cytotoxic effects of other NK cells expressing an anti-CD70 CAR. CD70 expression was higher (e.g., recovered) using guide set 3. Similar results are shown for a second Donor (FIG. 17B), again with guide RNA set 1 and 2 maintaining over 80% CD70 knockout. FIG. 17C shows control data. In several embodiments, sequential rounds of CD70 FACS can be used to obtain an NK cell population that is over about 95%, about 96%, about 97%, about 98%, about 99% or more, CD70 negative. In several embodiments, FACS can be followed by further expansion of this screened NK cell population to further increase NK cell number, and additional FACS screening could optionally be performed to further purify that expanded population.

[0306] Having shown that NK cells can be edited and expanded, experiments were performed to assess the ability of those cells to exert cytotoxic effects on target cells. Jurkat cells express CD27, which is the ligand for CD70. In contrast, Reh cells do not express CD27. FIGS. 18A-D show cytotoxicity data against either Jurkat or Reh cells at the indicated effector:target ratios, the experiment performed at Day 14 post-electroporation. FIGS. 18A and 18B are data from NK cells of a first donor, while 18C/18D are cells from a different donor. Notably, whether the target cells express the CD70 ligand, CD27, or not, NK cells can exert cytotoxic effects. The reduction of the E:T ratio (which effectively dilutes out the edited NK cells) yields an expected decrease in the overall cytotoxicity measured. Thus, as is in accordance with several embodiments disclosed herein, the relative cytotoxicity of an NK cell edited to reduce its native CD70 expression is retained against a given cell line. FIGS. 18A-18D also demonstrate that there are alternative mechanisms by which NK cells exert their cytotoxicity other than through a CD70-CD27 interaction. This is shown by virtue of the fact that CD70-negative NK cells can still retain cytotoxicity against Jurkat cells (which express the CD70 ligand, CD27), and can also exert cytotoxicity against Reh cells, which do not express CD27.

[0307] Experiments were also conducted to revisit the degree of impact, if any, of CD70 deletion on NK cell expansion. FIG. 19A shows a schematic of a KD0 gene editing protocol (as was used to generate the cells tested in FIGS. 18A-18D. However, at Day 13, a fraction of the cells were seeded at a relatively low density (0.5×10⁶ cells/well) in 24 well plates and expanded for an additional 7 days in low IL-2 media. Cell counts were performed by FACS at Day 20. Expansion data are summarized in FIG. 19B. Cells from the two donors mapped out by guide RNAs used in each row show reasonably consistent viability across the experimental sample, most samples being in the mid- to high-70's in terms of percent viable cells. Fold growth of the cells is shown in a box in FIG. 19B. These data demonstrate that experimental NK cells show between about 1.7 to about 2.5-fold growth over 20 days, even when CD70 expression is disrupted. FACS analysis of the expression levels of CD70 on NK cells at day 20 was performed and those data are shown in FIGS. 20A-20C. FIG. 20A shows CD70 expression for the first donor using the three knockout guides, and FIG. 20B shows the data for the second donor. FIG. 20C shows unedited NK cells and other relevant controls. The initial CD70 percentage expression, expression at Day 7 (the data discussed in FIGS. 16A-16B), and final CD70 expression is tabulated here. Knockout 1 and Knockout 2 maintained less than about 7% expression across those four samples, with Knockout 2 showing less than 3% of the NK cells expressing CD70 at the final Day 20 time point. Interestingly, Knockout 1 and Knockout 2, exhibited the two lowest CD70 expression levels, but also some of the highest fold-expansion values. Thus, as is in accordance with several embodiments disclosed herein, knockdown or knockout of native CD70 expression on NK cells (or T cells), does not impair the ability of the NK (or T) cells to expand in culture.

### Example 2—CD70 Knockout, CD70 Expression and Functionality of Jurkat Cells

[0308] As discussed in more detail below, several embodiments provided for herein relate to NK cells edited to reduce, substantially reduce, or eliminate native CD70 expression by the NK cells in conjunction with engineering the NK cells to express an anti-CD70 CAR. The gene editing reduces the suicide effect of the CAR-expressing engineered cells. In order to evaluate the ability of a give CAR to bind CD70, a control cell line was developed through gene editing to achieve high (e.g., at least about 100,000, at least about 150,000, at least about 200,000, at least about 250,000, or more, copies of CD70 per cell) CD70 expression. As mentioned above, Jurkat cells express relatively high levels of CD70, however, to mimic tumor-like CD70 expression, native CD70 expression was first knocked out with gene editing, then replaced achieve the desired copy numbers discussed above.

[0309] FIGS. 21A and 21B relate to CD70 knockout on Jurkat cells. FIG. 21A shows that each of guide RNA set 1, set 2, and set 3, reduce Jurkat CD70 expression by at least 96%. FIG. 21B shows control data. FIG. 22A shows a schematic time frame for knockout, expansion or storage of cells and analysis of CD70 expression. FIG. 22B shows data for CD70 expression after use of guide RNA set 1, 2, or 3, where the Jurkat cells were maintained in culture for the duration of the experiment, until CD70 FACS at Day 13. In these data, each of the guide RNA sets reduced expression by over 94%, with guide RNA set 2 reducing expression by over 97% and guide RNA set 1 by over 98%. FIG. 22C shows data for Jurkat cells that were expanded in the same manner as the cells in 22B, until day 11, at which time they were frozen. At Day 13, those cells were thawed and CD70 expression was assessed. As shown in FIG. 23C, the freeze/thaw cycle, which can often disrupt gene expression and/or viability of cells, did not appear to substantially alter the efficacy of the CD70 knockdown. This suggests that, according to several embodiments disclosed herein, Jurkat cells can be edited to reduce CD70 expression, then expanded and stored (e.g., frozen), with the storage period and the subsequent thaw cycle not adversely impacting the CD70 expression reduction. FIG. 22D shows relevant control data.

[0310] FIG. 23 shows a non-limiting schematic of a knock-in approach used to introduce expression of a gene or other desired construct into a particular location, ultimately for expression of that gene by the host cell. For example, in some embodiments, the host cell is an NK cell and the target locus is the endogenous CD70 locus. By directing a targeted insertion at that point, in some embodiments, the native CD70 expression is eliminated, and a CD70-targeting CAR could be inserted. Alternatively, the target locus could be CD70 and another gene of interest could be knocked in at that point. In still additional embodiments, for example with generation of high-CD70 Jurkat cells, the endogenous locus of CD70 could be targeted/interrupted, and an enhanced CD70 could be inserted (e.g., driven by an enhanced promoter, etc. to enhance CD70 expression to a desired level) and/or perhaps including a marker, such as GFP, to enable visualization of the edited cells.

[0311] Continuing the development of a high-CD70 expressing Jurkat cells for screening of CD70 CARS, a viral construct was generated encoding human CD70 tagged with GFP (hCD70) and used to transduce either wild-type Jurkat cells or Jurkat cells previously subjected to CD70 knockdown by guide RNA set 1 or guide RNA set 2. FIG. 24A shows (left to right) non-stained wild-type Jurkat cells, a secondary antibody control, and expression of the human CD70-GFP construct (which is essentially zero, as these are wild-type cells). FIG. 24B shows (left to right) the same data as discussed above but with Jurkat cells that are transduced with the human CD70-GFP construct. Here, nearly 85% of the cells express the delivered construct. FIG. 24C shows the corresponding data for Jurkat cells edited using guide RNA set 1. The right-most panel shows that nearly 97% of the CD70 expression has been eliminated. FIG. 24D shows Jurkat cells edited with guide RNA set 1 and transduced with the human CD70-GFP construct. Nearly 85% of the edited and transduced Jurkat cells express the detectable human CD70-GFP construct. FIG. 24E shows corresponding data for editing of Jurkat cells with guide RNA set 2, which resulted in over 98% reduction of CD70 expression. FIG. 24F shows “replacement” expression of human CD70-GFP through the viral transduction which results in over 90% of the Jurkat cells expression hCD70-GFP. These data are summarized in FIG. 25, with two different gating scenarios used to view the data in multiple ways. The MFI represents expression of human CDCD70-GFP by the indicated cells. 786-O cells are provided as a reference, as they are renal cell carcinoma cells, which is a tumor type known to highly express CD70. Notably, direct viral transduction of Jurkat cells with the human CD70-GFP construct results in robust hCD70-GFP expression, as does the reduction of endogenous CD70 expression with guide RNA set 1 or 2. However, when data is gated on the population of Jurkat cells that were transduced to a great level (rather than the entire Jurkat population), the expression of hCD70-GFP exceeds the CD70 expression of the 786-O RCC cells. This demonstrates that, according to several embodiments, an edited and engineered Jurkat cell line can be generated that is useful for the screening of anti-CD70-targeting CARs.

[0312] Jurkat cells were also subject to viral transduction with human anti-CD70 antibodies, shown as a non-limiting embodiment in FIGS. 26B and 26C as “NK71 scFv” and “NK72 scFv” (SEQ ID NO: 36 and SEQ ID NO: 37, respectively). Each of these antibodies has a flag tag (though according to some embodiments, none of the antibodies used in CAR constructs comprise a flag tag or any other tag). FIG. 26A shows control data. FIG. 26B shows expression of the NK71 antibody on the Jurkat cells and FIG. 26C shows expression of the NK72 antibody, which is elevated over the expression of the NK71 antibody.

[0313] FIGS. 27A-27F show data related to the determination of whether the NK71 or NK72 expressing Jurkat cells can bind human CD70. FIG. 27A shows (left to right) a negative control, an isotype control (hFC-APC) and Jurkat cell binding to CD70 (using a DNA sequence encoding the extracellular domain of human CD70 (NP_001243.1) (Gln 39-Pro 193) fused with the Fc region of human IgG1 at the N-terminus via a polypeptide linker) when added at two different concentrations (2 ug/ml) or (10 ug/ml). FIG. 27B shows (left to right) control binding when Jurkat cells are exposed to a murine Fc-directed antibody, binding of murine CD70 by the Jurkat cells (again at two concentrations) and the degree of NK71/NK72 expression by an APC-tagged anti-flag antibody. These data show that Jurkat cells, which have endogenous CD27 expression (the ligand for CD70) bind to human CD70, but less so to murine CD70. FIGS. 27C and 27D show corresponding data for Jurkat cells transduced with the NK71 antibody. Exposure of the Jurkat cells to 2 ug/mL of CD70 resulted in almost 50% of the Jurkat cells binding the CD70, whereas use of 10 ug/mL elevated that binding to over 80%. Similar patterns are seen with murine CD70 (27D), with the overall binding being less robust. The right-most panel of FIG. 27D shows that the binding data was achieved with just about 16% of the Jurkat cells expressing the NK71 antibody. FIGS. 27E and 27F show corresponding data for Jurkat cells transduced to express NK72. FIG. 27E shows (left to right, a negative control, isotype antibody control and significant binding of CD70 by the Jurkat cells at both 2 and 10 ug/mL, with the latter showing that nearly 97% of the Jurkat cells binding CD70. FIG. 27F shows corresponding data for murine CD70, and (right-most) that NK72 expression was quite robust, with nearly 83% of Jurkat expressing the NK72 antibody. Collectively, these data demonstrate that a target gene of interest can be knocked out efficiently through, according to several embodiments a combination of guide RNAs and that, also according to several embodiments cells can be engineered to express an antibody that binds to a target of interest. In several embodiments, such cells are beneficial for, for example, screening candidate binding moieties for one or more desired characteristics, e.g., affinity for target.

### Example 3—Editing of Multiple Genes and Engineering NK Cells With an Anti-CD70 CAR

[0314] As discussed above, in several embodiments, immune cells (e.g., NK cells) are edited, for example to knock down or knock expression of a target gene. In some embodiments, multiple genes are edited. In several embodiments, in addition to editing one or more target genes, immune cells (e.g., NK cells) are engineered to express a chimeric antigen receptor that targets one (or more) target antigens, such as a tumor marker. In several embodiments, immune cells, such as NK cells are edited to reduce, substantially reduce, and/or eliminate CD70 expression and engineered to express a CAR that targets CD70. In several embodiments, the immune cells are optionally also edited to reduce, substantially reduce, and/or eliminate CISH expression. In several embodiments, the immune cells are optionally also edited to reduce, substantially reduce, and/or eliminate TGFBR (e.g., TGFBR2) expression. In several embodiments, the immune cells are optionally also edited to reduce, substantially reduce, and/or eliminate NKG2A expression. In several embodiments, the immune cells are optionally also edited to reduce, substantially reduce, and/or eliminate ADORA2A (Adenosine 2a Receptor) expression. In several embodiments, the immune cells are optionally also edited to reduce, substantially reduce, and/or eliminate Cytokine Signaling 2 (SOCS2) expression. In several embodiments, the immune cells are optionally also edited to reduce, substantially reduce, and/or eliminate Casitas B-lineage lymphoma-b (Cbl-b) expression. In several embodiments, the immune cells are optionally also edited to reduce, substantially reduce, and/or eliminate Beta-2 Microglobulin (B2-microglobulin, or B2M) expression. In several embodiments, the immune cells are optionally also edited to reduce, substantially reduce, and/or eliminate T cell immunoreceptor with Ig and ITIM domains (TIGIT) expression. In several embodiments, the immune cells are optionally also edited to reduce, substantially reduce, and/or eliminate Programmed cell death protein-1 (PD-1) expression. In several embodiments, the immune cells are optionally also edited to reduce, substantially reduce, and/or eliminate T-cell immunoglobulin and mucin-domain containing-3 (TIM-3) expression. In several embodiments, the immune cells are optionally also edited to reduce, substantially reduce, and/or eliminate CD38 expression. In several embodiments, the immune cells are optionally also edited to reduce, substantially reduce, and/or eliminate T cell receptor alpha (TCR a) expression. In several embodiments, the immune cells are optionally also edited to reduce, substantially reduce, and/or eliminate CEACAM1 expression. In several embodiments, the immune cells are optionally also edited to reduce, substantially reduce, and/or eliminate DDIT4 expression. In several embodiments, the immune cells are optionally also edited to reduce, substantially reduce, and/or eliminate MAPKAP Kinase 3 (MAPKAPK3) expression. In several embodiments, the immune cells are optionally also edited to reduce, substantially reduce, and/or eliminate SMAD3 expression. Non-limiting examples of guide RNAs to edit one or more of such targets (e.g., using Cas9, CasX, CasY or other endonuclease) may be found in U.S. Provisional Patent Application No. 63/201,159, filed Apr. 15, 2021, the entire contents of which is incorporated by reference herein.

[0315] The tumor microenvironment (TME), as suggested with the nomenclature, is the environment around a tumor, which includes the surrounding blood vessels and capillaries, immune cells circulating through or retained in the area, fibroblasts, various signaling molecules related by the tumor cells, the immune cells or other cells in the area, as well as the surrounding extracellular matrix. Various mechanisms are employed by tumors to evade detection and/or destruction by host immune cells, including modification of the TME. Tumors may alter the TME by releasing extracellular signals, promoting tumor angiogenesis or even inducing immune tolerance, in part by limiting immune cell entry in the TME and/or limiting reproduction/expansion of immune cells in the TME. The tumor can also modify the ECM, which can allow pathways to develop for tumor extravasation to new sites. Transforming Growth-Factor beta (TGFb) has beneficial effects when reducing inflammation and preventing autoimmunity. However, it can also function to inhibit anti-tumor immune responses, and thus, upregulated expression of TGFb has been implicated in tumor progression and metastasis. TGFb signaling can inhibit the cytotoxic function of NK cells by interacting with the TGFb receptor expressed by NK cells, for example the TGFb receptor isoform II (TGFBR2). In accordance with several embodiments disclosed herein, the reduction or elimination of expression of TGFBR2 through gene editing (e.g., by CRISPR/Cas9 guided by a TGFBR2 guide RNA) interrupts the inhibitory effect of TGFb on NK cells.

[0316] As discussed above, the CRISPR/Cas9 system was used to specifically target and reduce the expression of the TGFBR2 by NK cells. Various non-limiting examples of guide RNAs were tested, which are summarized below.

TABLE 2
TGFb Receptor Type 2 Isoform Guide RNAs

| SEQ | | |
|---|---|---|
| ID | | |
| NO: | Name | Sequence |
| 124 | TGFBR2-1 | CCCCTACCATGACTTTATTC |
| 125 | TGFBR2-2 | ATTGCACTCATCAGAGCTAC |
| 126 | TGFBR2-3 | AGTCATGGTAGGGGAGCTTG |
| 127 | TGFBR2-4 | TGCTGGCGATACGCGTCCAC |
| 128 | TGFBR2-5 | GTGAGCAATCCCCCGGGCGA |
| 129 | TGFBR2-6 | AACGTGCGGTGGGATCGTGC |

[0317] In accordance with additional embodiments, a disruption of, or elimination of, expression of a receptor, pathway or protein on an immune cell can result in the enhanced activity (e.g., cytotoxicity, persistence, etc.) of the immune cell against a target cancer cell. In several embodiments, this results from a disinhibition of the immune cell. Natural killer cells express a variety of receptors, such particularly those within the Natural Killer Group 2 family of receptors. One such receptor, according to several embodiments disclosed herein, the NKG2D receptor, is used to generate cytotoxic signaling constructs that are expressed by NK cells and lead to enhanced anti-cancer activity of such NK cells. In addition, NK cells express the NKG2A receptor, which is an inhibitory receptor. One mechanism by which tumors develop resistance to immune cells is through the expression of peptide-loaded HLA Class I molecules (HLA-E), which suppresses the activity of NK cells through the ligation of the HLA-E with the NKG2A receptor. Thus, while one approach could be to block the interaction of the HLA-E with the expressed NKG2A receptors on NK cells, according to several embodiments disclosed herein, the expression of NKG2A is disrupted, which short circuits that inhibitory pathway and allows enhanced NK cell cytotoxicity.

[0318] CRISPR/Cas9 was used to disrupt NKG2A expression using the non-limiting examples of guide RNAs shown below in Table 3.

TABLE 3
NKG2A Guide RNAs

| SEQ | | |
|---|---|---|
| ID | | |
| NO: | Name | Sequence |
| 135 | NKG2A-1 | GGAGCTGATGGTAAATCTGC |
| 136 | NKG2A-2 | TTGAAGGTTTAATTCCGCAT |
| 137 | NKG2A-3 | AACAACTATCGTTACCACAG |

[0319] Other pathways that may impact immune cell signaling are edited, in several embodiments. One such example is the CIS/CISH pathway. Cytokine-inducible SH2-containing protein (CIS) is a negative regulator of IL-15 signaling in NK cells, and is encoded by CISH gene in humans. IL-15 signaling can have positive impacts on the NK cell expansion, survival, cytotoxicity and cytokine production. Thus, a disruption of CISH could render NK cells more sensitive to IL-15, thereby increasing their anti-tumor effects.

[0320] As discussed above, CRISPR/CAS9 was used to disrupt expression of CISH, though in additional embodiments, other gene editing approaches can be used. Non-limiting examples of CISH-targeting guide RNAs are shown below in Table 4.

TABLE 4
CISH Guide RNAs

| SEQ | | |
|---|---|---|
| ID | | |
| NO: | Name | Sequence |
| 130 | CISH-1 | CTCACCAGATTCCCGAAGGT |
| 131 | CISH-2 | CCGCCTTGTCATCAACCGTC |
| 132 | CISH-3 | TCTGCGTTCAGGGGTAAGCG |
| 133 | CISH-4 | GCGCTTACCCCTGAACGCAG |
| 134 | CISH-5 | CGCAGAGGACCATGTCCCCG |

[0321] FIG. 28A shows a schematic of a non-limiting embodiment of a gene editing approach used according to embodiment disclosed herein. Cells (e.g., NK cells) are electroporated at Day 0 in order to initiate gene editing though use of gene editing machinery. In several embodiments, CRISPR-Cas-based editing is used. Cells are cultured in high IL-2 media for one day, then expanded on feeder cells in low IL-2 media for an additional 6 days. At Day 7, cells are transduced with a viral construct encoding a CAR directed against a tumor and then expanded again for at least another 5 days prior to FACS analysis. In this experiment, double gene editing was performed to knock down expression of CD70 and the inhibitory receptor, NKG2A, or the combination of CD70 and TGFBR2 (CD70 knockout is shown above). FIG. 28B shows FACS analysis for expression of NKG2A after editing, while FIG. 28C shows the related control. Gene editing reduced NKG2A expression by over 50%, with less than 20% of the edited NK cells expressing the inhibitory receptor. FIG. 28D shows data for TGFBR2 expression post-editing, with FIG. 28E showing the related control. TGFBR2 express was reduced such that only about 3% of cells expressed the receptor. These data, in conjunction with the data above related to CD70 editing, demonstrate that immune cells, such as NK cells, can successfully be edited to alter expression of two or more target genes.

[0322] Having established that double knock out can be performed, the ability to express CARs as disclosed herein on the NK cells was also assessed. FIG. 29A shows expression of the NK71 CD70-targeting CAR on NK cells that were edited to reduce expression of CD70 (using CD70-1 guide RNA). Nearly 90% of the NK cells expressed the NK71 CAR. FIG. 29B shows the substantially eliminated expression of CD70 in those NK cells (only about 5% of the cells expressed CD70). FIG. 29B shows expression of the NK71 CAR by cells doubly edited to reduce CD70 and CISH expression. Again, nearly 90% of the doubly-edited NK cells expressed the NK71 CAR. FIG. 29D again confirms substantial reduction in CD70 expression on the NK cells. FIG. 29E shows expression of the NK71 CAR by cells doubly edited for CD70 and NKG2A. Over 90% of the doubly-edited NK cells expressed the CAR. As shown in FIG. 29F, CD70 expression was substantially reduced in these doubly-edited NK cells as well. FIG. 29G shows NK71 expression on NK cells doubly-edited to reduce expression of CD70 and TGFBR2, with over 87% of the cells expressing the CAR. As shown in FIG. 29H, CD70 expression was reduced by nearly 90% in these cells. FIGS. 29I and 29J show control data (mock gene editing, e.g., electroporation only). All data presented in FIG. 29 was obtained at Day 11 (4 days after transduction).

[0323] Data was collected on these say groups at Day 18 (11 days after transduction) to assess the persistence of the gene editing and the stability of CAR expression. Data for NK71 expression in CD70 knockouts is shown in FIG. 30A with corresponding CD70 expression data in FIG. 30B. Data for NK71 expression in CD70-CISH knockouts is shown in FIG. 30C with corresponding CD70 expression data in FIG. 30D. Data for NK71 expression in CD70-NKG2A knockouts is shown in FIG. 30E with corresponding CD70 expression data in FIG. 30F. Data for NK71 expression in CD70-TGFRB2 knockouts is shown in FIG. 30G with corresponding CD70 expression data in FIG. 30H. Corresponding control data is shown in FIGS. 30I and 30J. Of note in this data is that NK71 expression was maintained across each of the knockout groups and also that CD70 expression was further diminished in each group, with all groups showing 97% or more reduction in CD70 expression.

[0324] Viewing the expression data in another way, FIG. 31A shows a plot of the mean fluorescence intensity (MFI) detected, representing NK71 expression, after each of the gene editing approaches undertaken. As can be seen, each of the gene edited cells, regardless of single or double gene editing, expressed the NK71 CAR at elevated levels over control, with relatively consistent MFI across each gene editing approach. The percentage of NK71 positive cells (out of the entire population tested) is shown in FIG. 31B. Regardless of the gene editing approach undertaken, at least 60% of the NK cells expressed NK71. The single CD70 knockout and the combination CD70/CISH knockout expressed the greatest percentage of NK71, at almost 80% and about 85%, respectively. FIG. 31C shows the percentage of CD70 expression (in terms of percent reduction). As can be seen, each of the gene editing techniques, whether targeting CD70 alone, or in combination with other targets, yielded nearly 100% reduction in CD70 expression. FIGS. 32A-32B show corresponding data for the NK72-expressing NK cells. Together these data show that gene edited cells, whether with respect to editing a single target, or two targets, are still capable of expressing a CAR at significant levels of expression.

[0325] As various gene edits can impact signaling pathways (and thus increase or enhance, proliferation, cytotoxicity, and/or persistence), an experiment was performed to assess the impact of gene editing of proliferation of edited/engineered NK cells. 3×10⁵ NK cells were transduced (on Day 7 after gene editing) with a viral construct encoding either the NK71 or NK72 CAR. Gene edits, single or double, were made as discussed above. FIG. 33A shows that, at Day 12 (5 days post-transduction), proliferation of CD70 knockout and CD70/TGFBR2 knockouts proliferated at about the same rate over the 5 days in culture. Interestingly, CD70/CISH showed substantially more (about 30%) more proliferation than either the CD70 knockout or the CD70/TGFBR2 knockout. In contrast, the CD70/NKG2A knockout showed reduced proliferation compared to all other groups. FIG. 33B shows a similar pattern in cell proliferation for cells transduced with the NK72 CAR.

[0326] Additional data was collected to evaluate the longer-term viability/proliferation of engineered/edited NK cells. Culturing of the engineered and edited NK cells was carried out to 35 days, with cell population viability measured at Day 14, 21, 28 and 35. The results are shown in FIGS. 34A and 34B for NK71-expressing and NK72-expressing NK cells, respectively. The pattern of viability in this experiment parallels the proliferation data discussed above. Regardless of the editing approach used, all the groups showed an upswing in overall viability between days 14 and 21. The CD70/NKG2DA group had the smallest increase, CD70 alone and CD70/TGFBR2 performed similarly and CD70/CISH outpaced each of the other groups. Moving from Day 21 to 28 and on to 35, each of the groups showed a decline in the viability of the populations, however, CD70/CISH edited cells showed the least decline over time, with the overall viability being substantially higher than the other groups as Day 35. In accordance with several embodiments, gene editing can enhance not only the ability of the edited cells to proliferate, but also enhance their viability as compared to unedited cells. In several embodiments, a dual modification (or more) can synergistically interact to yield robustly proliferating cells expressing a CAR, with enhanced viability of those cells. Advantageously, in several embodiments, these modifications lead to an easier generation of clinically relevant cell numbers.

[0327] Having confirmed that edited and engineered cells express a CAR, proliferate successfully in culture, and have enhanced viability compared to un-edited cells, their anti-tumor effects were investigated. FIG. 35A shows cytotoxicity data of the indicated edited and engineered NK cells against 786-O cells, a renal cell carcinoma line expressing high levels of CD70. These edited NK cells were transduced with the NK71 CAR and cytotoxicity was measured starting at Day 14 post editing. TGFb, a cytokine that acts as an NK cell inhibitor in the tumor microenvironment, was not added here. A CD19-targeting CAR construct expressed by NK cells (unedited) was used as a control, as were 786-O cells cultured alone. At the E:T ratio of 1:1 each of the gene edited groups substantially reduced 786-O growth over the course of the experiment, with the end results being largely indistinguishable across the groups. FIG. 35B shows the same setup, but with an E:T ratio of 1:2. With the reduction in the number of effector NK cells, the various gene editing approaches begin to show distinct results. Each of the CD70, CD70/TGFBR2 and CD70/NKG2A groups successfully controlled 786-O tumor cell growth, but not to the same extent as the CD70/CISH edited NK71-expressing NK cells. This group showed not only a more rapid anti-tumor effect, but also an overall greater reduction in the tumor cell number. FIG. 35C shows corresponding data for NK cells edited and engineered to express the NK72 CAR, and using an E:T of 1:1. The data are similar to that of the NK71 construct, with all editing groups successfully controlling tumor growth. FIG. 35D shows NK72 cytotoxicity data at an E:T of 1:2. Similar to the NK71 cells, the editing approach undertaken causes some separation in the cytotoxicity of the NK cells, though less pronounced than with the NK71 CAR. Here, CD70 and CD70/NKG2A edited cells showed less robust tumor growth control. CD70/CISH edited NK cells successfully controlled growth (slightly improved over the prior two groups) and CD70/TGFBRR2 modestly outperformed the CD70/CISH cells. In accordance with several embodiments, the editing approach undertaken works in concert with a given CAR, and in some embodiments, a specific CAR may be more effective with a specific knockout or knockouts of target genes in the engineered cell.

[0328] FIGS. 36A-36D show corresponding data to that of 35A-35D, but using the ACHN tumor cell line as the target, as it expresses low levels of CD70. These data are indicative of not only the cytotoxicity of the engineered/edited NK cells through CD70-mediated means, but also through the normal cytotoxicity that NK cells would provide. FIG. 36A shows each of the edited NK-71 expressing cell groups effectively halting ACHN tumor cell growth at 1:1:E:T. FIG. 36B shows a large separation in the groups, with CD70/CISH edited cells showing robust anti-tumor effects. FIGS. 36C and 36D show similar patterns with CD70/CISH edited NK72-expressing cells showing the most effective tumor growth control. Thus, in several embodiments, gene editing enhances the cytotoxicity of engineered immune cells in a target-independent fashion. For example, according to several embodiments CD70/CISH editing imparts to NK cells expressing an anti-CD70 CAR a heightened ability to exert cytotoxic effects against the tumor, whether the target tumor is rich or sparse in marker identified by the CAR.

[0329] FIG. 37A shows additional cytotoxicity data against the 786-O RCC tumor cells, now at 14 days post-transduction (21 days post gene editing). A 1:2 E:T ratio is used here and an NKG2D-directed CAR-expressing NK cell (NKX101) is added for comparison. Those cells, from another donor, were previously engineered to express the NKG2D-OX40-CD3Z construct, expanded, frozen and were thawed for this comparative assay. NK71-expressing edited NK cells each showed robust tumor control, though the CD70/NKG2A group allowed greater amounts of tumor growth before leveling off and suppressing further increases. Further dilution of the effector cells (a 1:4 E:T ratio) again caused differences in the cytotoxicity of the various groups. CD70/NKG2A edited NK71-expressing NK cells showed the least amount of tumor growth control, with singly-edited CD70 edited NK71-expressing NK cells showing modest improvement. CD70/TGFBR2 edited cells exhibited a relatively consistent reduction in 786-O cell numbers after an initial peak about 2 days into the experiment. Notably the CD70/CISH edited NK cells reduced the growth of the tumor cells to the lowest level of any group, including those NK cells operating through a non-CD70 route. FIG. 38A shows corresponding data at a 1:2 ratio against ACHN cells. Given the lower CD70 expression on these cells, the CD70/NKG2A edited NK cells failed to control tumor growth, given that groups previously discussed reduced proliferation and viability. Each of the CD70 and CD70/TGFBR2 edited groups exhibited reasonable control of tumor growth. Most notable, however was that the CD70/CISH edited group nearly paralleled the significant suppression of tumor growth exhibited by NKG2D-targeting NK cells, despite the CD70/CISH cells being directed to a target that has reduced presence on this tumor cell line. This is in accordance with embodiments as discussed above, where the CD70/CISH gene editing positively impacts the edited NK cell in a non-target dependent manner, for example through enhanced generation of cytotoxic signals, improved metabolic profiles of the NK cell such that the edited NK cell population can expand to change the starting E:T ratio from the 1:2 starting point. This point is made more clear when seeing the results presented in FIG. 38B, wherein a 1:4 E:T ratio was used and all groups other than CD70/CISH-edited NK71-expressing NK cells allowed substantial tumor growth. In accordance with several embodiments disclosed herein, gene editing of CD70 and CISH in combination results in edited immune cells, e.g., NK cells, that are unexpectedly effective against tumor cells, even those expressing limited quantities of the targeted marker. FIGS. 39A-39B show corresponding data for NK cells expressing the NK72 CAR, with generally similar trends in the data, in that, of the edited cells, the CD70/CISH edited cells outperform the other editing approaches undertaken in terms of controlling 786-O cell growth. Likewise, FIGS. 40A and 40B show corresponding data for NK72-expressing edited NK cells against low-CD70 ACHN cells. As above, CD70/CISH edited cells showed the most robust tumor cell growth control. In accordance with several embodiments, CD70 and CISH editing drive the edited NK cells (or T cells) to exhibit unexpectedly superior anti-tumor effects, even at lower initial E:T ratios. As discussed above, in several embodiments, the CD70 and CISH editing allow the NK cells to avoid the suicide effect of the anti-CD70 CAR and also upregulate various aspects of the edited NK cell metabolism and/or cytotoxic actions.

[0330] Further experiments were conducted to evaluate the CD70/CISH knockouts and their enhanced anti-tumor effects. FIG. 41A shows the embodiment of gene editing and engineering used for this example and FIGS. 41B-41O show the expression results. Guide RNAs used were CD70-1 and CISH-1, in this experiment. Edited NK cells were transduced at Day 7 with viral constructs encoding either NK71 or NK72. FIG. 41B is an unstained control and FIG. 41C is a CD70 positive control cell. FIG. 41D shows CD70 expression on NK cells after editing and FIG. 41D shows NK71 expression. FIGS. 41F-41G show corresponding data for CD70 and NK72 expression, respectively. FIGS. 41H-41I show corresponding data for CD70 and NK71 expression, respectively, when both CD70 and CISH were edited. FIGS. 41J-41K show corresponding data for CD70 and NK72 expression, respectively, when both CD70 and CISH were edited. FIGS. 41L-41M show corresponding data for CD70 and NK71 expression, respectively, when cells were exposed only to electroporation (no guide RNA/CRISPR) and transduction with NK71. FIGS. 41N-41O show corresponding data for CD70 and NK72 expression, respectively, when cells were exposed only to electroporation (no guide RNA/CRISPR) and transduction with NK72. As discussed above, these approaches yield substantial, if not total reduction in the amount of CD70 and/or CISH expressed by the NK cells. If expression is not reduced to below detectable levels, according to several embodiments, the function of the related pathways of CD70 and/or CISH is substantial or significantly disrupted. Having disrupted both CD70 and CISH expression, the cytotoxicity of NK71 and NK72 expressing NK cells was evaluated. FIG. 42A shows cytotoxicity data against 786-O cells by NK71-expressing NK cells having been edited in the indicated manner. An E:T of 1:2 was used and as indicated the NK cells were pre-treated overnight with (or without) TGFbeta in culture prior to the experiment and during the experiments. As mentioned above, TGFbeta is a cytokine that is released by tumor cells into the tumor microenvironment and is one way by which certain tumors evade immune cells. As with the data discussed above, CD70/CISH-edited NK cells were able to control tumor growth. Notably, however, is the ability of CD70/CISH-edited NK cells to substantially control tumor growth after pre-treatment with and in the presence of TGFb. Given that TGFb inhibits immune cell activity, the presence of TGFb would be expected to limit the ability of the NK71-expressing NK cells to effectively control the growth of the tumor cells, an effect seen in the CD70-edited NK71-expressing NK cells treated with TGFb, which controlled tumor growth in a manner indistinguishable from control. Unexpectedly, the CD70/CISH edited cells exposed to TGFb controlled tumor growth nearly as well as those cells not inhibited by the presence of TGFb. These effects are seen on the low-CD70-expressing ACHN cells, in FIG. 42B. In this experiment, one would have expected the experimental groups with TGFb present to show limited ability to control ACHN cell growth, as the ACHN cells lack the robust CD70 expression of certain cells, like 786-O, and the TGFb would be expected to inhibit the NK cells. What the data in FIG. 42B show, unexpectedly, is that the CD70/CISH editing, even in the presence of the inhibitory TGFb, enables NK cells to achieve tumor growth control on par with those experimental groups not exposed to the inhibitory signals of TGFb. In some embodiments, the CISH knockout enables the edited cells to overcome the inhibitory effect of TGFb, in a substantial, if not complete manner. In several embodiments, this endows the CD70-CISH edited NK cells expressing a CAR, such as an anti-CD70 CAR with enhanced ability to effectively control tumor progression, with the cytotoxic effects limiting, if not reducing and/or eliminating tumor cells. FIG. 42C shows corresponding cytotoxicity data for edited NK cells engineered to express the NK72 CAR. As discussed above, the CD70/CISH edited NK cells show substantial anti-tumor effects, even in the presence of the inhibitory TGFb cytokine, which corresponds to several embodiments of the edited and engineered NK cells disclosed herein.

### Example 4—Further Editing of Multiple Genes, Including Tumor Microenvironment-Related Genes

[0331] According to several embodiments disclosed herein, gene editing of NK and/or T cells results in the edited cells having increased resistance to inhibitory factors that may be present in the tumor microenvironment. In addition to the experiments discussed above, additional experiments were conducted to further evaluate the effects of gene editing on NK (or T cell) cytotoxicity.

[0332] As discussed above, NK cells express endogenous CD70 and expression of an anti-CD70 CAR (designed to target a CD70-expressing tumor) would result in destruction of the engineered NK cell population due to lack of differentiation between the CD70-expressing NK cells and CD70-expressing tumor cells. Thus, several embodiments in which NK cells are engineered to express CD70 also include gene editing to reduce, or knockout, CD70 expression by the NK cells. FIGS. 43A-43I show data related to the gene editing of NK cells to knockout CD70 expression using different guide RNAs, or combinations of guide RNAs (expression evaluated at 7 days post-electroporation). FIG. 43A shows that use of CRISPR-Cas9 gene editing with CD70-1 guide RNA reduced CD70 expression by over 75%. Editing using CD70-2 guide RNA reduced CD70 expression by over 60% (43B). Editing using CD70-3 guide RNA reduced CD70 expression by over 55% (43C). The combination of guide RNA 1 and 3 reduced CD70 expression on NK cells by over 75% (43D). The combination of guide RNA 1 and 2 also reduced CD70 expression on NK cells by over 75% (43E). The combination of guide RNA 2 and 3 reduced CD70 expression on NK cells by nearly 85% (43F). As discussed herein, in several embodiments, multiple genes are edited in combination. FIG. 43G shows reduced expression of CD70 (by almost 80%) when NK cells were edited using CD70-1 guide RNA in combination with guide RNA (CISH-1) targeting CISH. Similarly, CD70 expression was reduced by over 80% when CD70-1 guide RNA was used in combination with three guide RNAs targeting the adenosine receptor (A2AR). The three, non-limiting examples of guide RNAs targeting A2AR are shown in Table 5.

TABLE 5
Adenosine Receptor (A2AR) Guide RNAs

| SEQ | | |
|---|---|---|
| ID | | |
| NO: | Name | Sequence |
| 396 | A2AR-1 | CGAGGAGCCCATGATGGGCA |
| 397 | A2AR-2 | GGGCAATGTGCTGGTGTGCT |
| 398 | A2AR-3 | CAGTGACACCACAAAGTAGT |

[0333] These data demonstrate that targeting multiple genes in combination does not reduce the effectiveness of CD70 gene editing. FIG. 43I show control (electroporation only) CD70 expression on NK cells.

[0334] Data regarding the cytotoxicity of these various constructs. FIG. 44A shows the percent cytotoxicity of the gene edited NK (note, for this data, the NK cells were not engineered to express a CAR) cells against REH tumor cells at either a 1:1: or 1:2 E:T ratio. These gene edited cells exhibited between about 35-50% cytotoxicity against the REH tumor cells at a 1:1 E:T ratio, while the electroporation only (EP) and un-edited (UN) NK cells yielded about 20-25% cytotoxicity at 1:1 E:T ratio. Shifting to a 1:2 E:T ratio decreased the cytotoxicity of all groups, with the controls dropping to about 10% and the majority of the edited cells yielding between about 20-30% cytotoxicity. These data are also shown in a different manner in FIGS. 44B (1:1) and 44C (1:2), which allow for additional insight into how various edits may impact the efficacy of NK cells. Editing of NK cells with any of CD70-1, or -2 guide RNAs alone resulted in similar cytotoxicity. Use of guide RNA CD70-3 or CD70-1+3 appeared to slightly improve cytotoxicity. In contrast, the combination of guide RNA CD70-2+3 or 1+2 appeared to lower cytotoxicity. CISH and A2AR edited NK cells each exhibited cytotoxicity in the same (CISH) or slightly higher (A2AR) as the CD70 edited cells at a 1:1 E:T ratio. A similar pattern is shown in FIG. 44C, with a 1:2 E:T ratio. These data demonstrate that, in some embodiments, a particular guide RNA can work particularly well. However, these data also show that, even with some slight variance in the change in cytotoxicity between the editing machinery used, editing causes an increase in cytotoxicity (e.g., through resistance to TME signaling) as compared to non-edited cells.

[0335] FIG. 44D shows additional data evidencing further increases in cytotoxicity when gene edited cells are engineered to express anti-tumor CARs. In this experiment Nalm6 cells were used as the target tumor cell and were incubated with various NK cells at a 1:1 E:T ratio (20,000 target cells). As expected, Nalm6 cells alone increased throughout the course of the experiment. Nalm6 cells incubated with control NK cells (either electroporated only (EP) or un-electroporated (UN) showed reduced growth over time, as compared to Nalm6 alone. Editing NK cells (but not engineering) further reduced Nalm6 grown as shown by the two traces for CD70-1 and CD70-2. Those NK cells edited using CD70-1 or CD70-2 guide RNA and engineered to express a non-limiting embodiment of a CD19-targeting CAR, as well as non-edited NK cells engineered to express the same CAR resulted in complete eradication of the target Nalm6 tumor cells. Thus, according to several embodiments, expression of an anti-tumor CAR and gene editing of an immune cell, such as an NK cell, yields a highly cytotoxic edited/engineered cell. In several embodiments, other aspects of the edited/engineered cell are enhanced, such as the life span of the cell (e.g., persistence), particularly persistence in vivo, the ability of the cells to be expanded and/or stored, and the like. In several embodiments, the editing allows the edited and engineered cells to be used at lower E:T ratios, but still effectively control tumor growth.

[0336] FIG. 45A further explores the effects of gene editing, with CD70-knockout NK cells also being edited for either CISH knockout or adenosine receptor (A2AR) knockout. The indicated edited cells (non-engineered) or control cells (electroporation only (EP) or un-electroporated (UN)) were incubated with Reh tumor cells at a 1:1 ET ratio (20,000 NK cells). Control Reh cells expanded significantly in the first several days of the experiment with growth plateauing and maintaining elevated population levels for the duration of the experiment. Control EP and UN NK cells delayed Reh cell expansion in the initial phases, but eventually the Reh cells began rapid expansion near the close of the co-culturing. In contrast, CD70-edited cells (CD70-1 gRNA) allowed only modest growth in the last day of the experiment. Likewise, editing with CD70-1 gRNA in combination with editing CISH resulted in even further control to Reh tumor cell growth. Following in this trend, editing with CD70-1 gRNA in combination with editing the adenosine receptor resulted in the greatest control of Reh cell growth. FIG. 45B shows similar experimental results, but with an E:T ratio of 1:2. These data shows that the relative performance of the dually-edited NK cells is more condensed, making it more difficult to determine which set of cells is exhibiting the greater cytotoxicity. However, this data also confirms either single, or multiple, gene edits to reduce, or eliminate in several embodiments, expression of certain genes, such as CISH, A2AR, or other genes related to the immune suppressive nature of the tumor microenvironment, yield immune cells (e.g., NK cells or T cells, depending on the embodiment) with enhanced tumor-directed cytotoxicity. As discussed above, in several embodiments, other characteristics of the edited immune cells may also be enhanced, e.g., persistence, expansion capacity, etc.

[0337] Further investigation into the enhanced anti-tumor effects of gene edited immune cells was undertaken by gene editing certain tumor microenvironment related genes in conjunction with engineering the immune cells, here NK cells, to express an anti-CD70 CAR (to target CD70-expressing tumor cells). FIGS. 46A-46J show FACS analysis of various gene edits in conjunction with engineering to induce expression of a non-limiting embodiment of an anti-CD70 CAR, here NK71. FIG. 46A shows the distribution of NK cells that are (i) positive for NK71 expression and (ii) negative for CD70 express (based on editing the NK cells used with guide RNA CD70-1). Approximately 84% of the NK cells sampled met this expression profile. Similarly, about 85% of the NK cells sampled exhibited NK71 expression and reduced CD70 expression with the editing of the cells using CD70-2 guide RNA (FIG. 46B). Slightly higher degrees of NK71-expressing/CD70-edited cells were detected when CD70 was edited using guide RNA CD70-3 or the combination of guide RNA CD70-1 and -3 (nearly 87% for both; FIGS. 46C-46D). Use of guide RNAs CD70-2 and -3 yielded almost 90% of the NK cells sampled with this phenotype (FIG. 46E). Similarly, use of guide RNA CD70-1 and -2 yielded over 85% of the NK cells sampled with this phenotype (FIG. 46F). Similar numbers resulted when editing the cells using both CD70-1 to knockdown CD70 expression and CISH-1 guide RNA to knock down CISH expression (˜84%, FIG. 46G) and CD70-1 to knockdown CD70 expression and A2AR-1, -2, and -3 guide RNA to knock down A2AR expression (FIG. 46H). FIGS. 46I and 46J show control data. Together, these data confirm that significant numbers of immune cells, such as NK cells, can successfully be both edited (with multiple targets, in several embodiments) and engineered to express a tumor-targeting CAR.

[0338] Having shown that immune cells, such as NK cells, could be both edited (multiple targets in several embodiments) and engineered to express a CAR, experiments were performed to determine the cytotoxicity of such cells. 786-O cells, a renal cell carcinoma cell line known to express high levels of CD70, was used as the target tumor cell for a portion of this experiment. FIG. 47A shows the experimental results when the various NK cell constructs are present in a 1:2 E:T ratio (10,000 NK cells). As would be expected the negative control 786-cells alone expanded quickly and maintained a relatively high cell count throughout the experiment. Electroporated only cells (EP) allowed for a fairly robust early stage increase followed by a long, tapered decline, starting around 2 days after co-culture with the 786-O cells. CD70-1 guide RNA edited cells showed a similar pattern but with improved overall control in tumor cell numbers. With an overall cytotoxicity profile resembling those of CD70-1 guide RNA edited cells in shape only, those cells that were additionally engineered to express NK71 (a non-limiting CD70-targeting CAR) exhibited profoundly more favorable control of tumor expansion. Notably, in this experiment, the profound control of tumor growth is at a 1:2 E:T ratio, indicative of the highly effective nature of cells according to embodiments disclosed herein against tumor cells generally, but in particular against cells expressing elevated levels of the target of a CAR expressed by edited/engineered cells.

[0339] Further demonstrating the enhanced cytotoxicity against cells expressing elevated levels of a tumor marker targeted by a CAR expressed by edited and/or engineered immune cells is the data shown in FIG. 47B. The experimental setup here reduced the E:T ratio to 1:4 (5,000 NK cells) and used high-CD70 expressing Reh cells and the indicated edited and/or edited and engineered NK cells. As can be seen in this data, the editing of NK cells to reduce expression of NK cells continued to allow the edited CD70 knockout cells (CD70-1) to control tumor growth more effectively than control NK cells. The additional engineering of the edited NK cells to express an anti-CD70 CAR (CD70+NK71) further improved the cytotoxic effects. Advantageously, editing multiple genes in the NK cells, either CD70+CISH or CD70+A2AR, coupled with engineering the cells to express an anti-CD70 CAR yielded still further improvements in cytotoxicity against the target 786-O cells, most notably with A2AR editing. Similar trends are shown in FIG. 47C, where the E:T ratio was further reduced (1:8, 2,500 NK cells). These data further demonstrate the enhanced cytotoxicity against target cells that is induced as a result not only of editing an immune cell, like an NK cell, but the unexpectedly enhanced cytotoxicity that results from editing multiple targets (such as TME-related genes) in conjunction with engineering of the cells to express a CAR.

[0340] Further demonstrating the advantage of targeting a tumor marker that is prevalent on a target cell with a CAR specific to that marker is the data presented in FIGS. 47D-47F, which employed co-culture of various edited and/or edited and engineered NK cells against ACHN tumor cells, which express relatively low levels of CD70. As can be seen in FIG. 47D (1:2 E:T, 10,000 NK cells), editing of CD70 alone resulted in NK cells with cytotoxicity on par with that of NK cells subjected to electroporation alone (EP). Tumor growth in this experimental setup was similar, whether NK cells were present or not, suggesting the ACHN cells grow and expand through a series of signals that does not involve expression of CD27, the binder for CD70 (normally expressed by NK cells), or involves some other TME-signaling moiety that blocks/reduces immune cell function, otherwise, the CD70-1 guide RNA NK cells would have been expected to perform more poorly than EP cells alone. Even with the relatively low expression of CD70 in ACHN cells, the engineering of the NK cells to express NK71, a non-limiting example of an anti-tumor CAR, yielded substantial improvements in reducing tumor growth as compared to control, though overall, there was still increased tumor cell count over time. These trends are exemplified in FIGS. 47E and 47F, which employed 1:4 and 1:8 E:T ratios, respectively (target cell number is held constant at 20,000 cells in these cytotoxicity assays). This effectively dilutes the effector cells as compared to the targets, and without the ability to bind an overexpressed CD70 via the CAR, ACHN tumor growth progressed to levels indistinguishable from control. These data support the approach that, for a given cancer, gene editing in conjunction with engineering an immune cell with a CAR targeting a marker expressed by the target tumor cell can yield enhanced resistance to immune suppressive signals from the tumor microenvironment and ultimately yield enhanced cytotoxicity, persistence and/or overall efficacy against a tumor.

[0341] To further elucidate the ability of gene editing of immune cells, such as NK cells, additional experiments were conducted comparing the cytotoxicity of gene edited cells engineered to express a non-limiting embodiment of a CAR directed against CD70, here NK71 in the presence and absence of an inhibitor of the gene that was edited. In this experiment, NECA, a high affinity adenosine receptor agonist was used. NECA has Ki (inhibitory concentration) of 6.2, 14, and 20 nM for human adenosine receptor subtypes A3, A1 and A2A receptors respectively and an EC50 of 2.4 μM for human A2B receptor. Adenosine (e.g., extracellular adenosine in the blood stream) acts on immune cells, including NK cells, by binding to one of these four adenosine receptors, most notably the A2A receptor (A2AR), with a resultant suppression of NK cell immune function. Thus, the presence of NECA in the co-culture of tumor cells and NK cells would be expected to negatively impact the cytotoxic function of the NK cells. As can be seen in FIG. 48A (in the cytotoxicity plot) and 48B (histogram), as compared to NK cells expressing NK71 alone with NECA in the co-culture with 786-O cells, NK cells expressing NK71 and edited for A2AR disruption, the latter NK cells exhibited a greater degree of cytotoxicity. Comparisons of these two groups are indicated by dashed lines. Note that FIG. 48A does not include a trace for 786-O cells alone, which allows for greater visual separation of the cytotoxicity curves for the various treatment groups. Additional data is shown on FIGS. 48C and 48D. Here, an E:T of 1:2 was used (1:1 used in 48A) and the tested constructs show relatively similar cytotoxicity profiles (again with a control not shown to reduce compaction of the line graphs in FIG. 48C. The histogram of 48D summarizes this data. As can be seen CISH editing of NK cells increases the cytotoxic effects of NK cells expressing NK71 (compare 1^{st} vs. 2^{nd} histogram bar). Interestingly, editing of CISH (5^{th} bar) as well as editing of A2AR (6^{th} bar) resulted in increased cytotoxicity (less signal detection from tumor cells), even when NECA was present (4^{th} bar). It is contemplated that there may be some common downstream signaling between CISH and A2AR that account for this resistance to NECA, which mimics an agonist-based suppression of NK cell function as may be seen in the tumor micro-environment. Thus, according to several embodiments, editing CISH and/or A2AR (or another target involved in tumor micro-environment-related immune cell suppression) in an immune cell, such as an NK cells, can not only provide a degree of resistance to immune suppressive effects of the tumor microenvironment, but can act synergistically with an anti-tumor CAR expressed by the immune cell, such as an anti-CD70 CAR to result in enhanced cytotoxicity against a tumor. This approach can also, according to several embodiments, result in other improved characteristics of the cells, such as enhanced persistence (especially in the tumor microenvironment), increased expansion capacity; increased target specificity, and reduced dosage requirements (either lower numbers of administered cells or increased time between doses, among others.

[0342] Additional genes known to affect NK cell activity were also investigated. More specifically, the genes mothers against decapentaplegic homolog 3 (SMAD3), MAP kinase-activated protein kinase 3 (MAPKAPK3), carcinoembryonic antigen-related cell adhesion molecule 1 (CEACAM1), and DNA-damage-inducible transcript 4 (DDIT4) were investigated. SMAD3 is an intracellular downstream signaling protein for the TGFb ligand superfamily. SMAD3-mediated TGFb receptor or ALK4 signaling may lead to inhibition in NK cells. MAPKAPK3 activity suppresses IFN-gamma gene expression and attenuates NK cell cytotoxicity. CEACAM1 is a checkpoint molecule on the NK cell surface, and is highly upregulated during NK cell feeder expansion. DDIT4 is a negative regulator of mTORC1; mTORC1 enables IL-15 mediated NK cell survival, proliferation, cytotoxicity, and glucose metabolism. Therefore, it was examined whether knocking out these genes would improve efficacy of anti-CD70 CAR NK cells. Non-limiting embodiments of guide RNAs for disrupting SMAD3, MAPKAPK3, CEACAM1, and DDIT4 are provided in Table 6.

TABLE 6
Additional guide RNAs

| SEQ | | | |
|---|---|---|---|
| ID | | | |
| NO: | Target | Name | Sequence |
| 1190 | SMAD3 | SMAD3 guide | CCGATCGTGA |
| | | RNA 1 | AGCGCCTGCT |
| 1191 | SMAD3 | SMAD3 guide | CGAGAAGGCG |
| | | RNA 2 | GTCAAGAGCC |
| 1192 | SMAD3 | SMAD3 guide | CTTGGTGTTG |
| | | RNA 3 | ACGTTCTGCG |
| 1193 | MAPKAPK3 | MAPKAPK guide | CTCTGCTGTT |
| | | RNA 1 | TCACCATCCA |
| 1194 | MAPKAPK3 | MAPKAPK guide | CCCGGCTTGG |
| | | RNA 2 | GCGGTGCTCC |
| 1195 | MAPKAPK3 | MAPKAPK guide | CGACTACCAG |
| | | RNA 3 | TTGTCCAAGC |
| 1196 | CEACAM1 | CEACAM1 guide | GACTGAGTTA |
| | | RNA 1 | TTGGCGTGGC |
| 1197 | CEACAM1 | CEACAM1 guide | GAATGTTCCA |
| | | RNA 2 | TTGATAAGCC |
| 1198 | CEACAM1 | CEACAM1 guide | GAGAGGCTGA |
| | | RNA 3 | GGTTTGCCCC |
| 1199 | DDIT4 | DDIT4 guide | CCTCACCATG |
| | | RNA 1 | CCTAGCCTTT |
| 1200 | DDIT4 | DDIT4 guide | CGATCTGGGG |
| | | RNA 2 | TGGGAGTTCG |
| 1201 | DDIT4 | DDIT4 guide | GTTTGACCGC |
| | | RNA 3 | TCCACGAGCC |

[0343] An non-limiting schematic of an anti-CD70 CAR and a gene editing/expansion protocol is provided in FIG. 49A. NK cells were first gene edited (e.g. using CRISPR/Cas electroporation) to doubly knockout CD70 and one of these target genes. Electroporated cells were cultured in high IL-2 conditions and subsequently with IL-12 and IL-18 to expand NK cells. At day 7 after gene editing, NK cells were transduced with a virus harboring a CAR genetic sequence, for example NK71 (as seen in FIG. 6). Following transduction, NK cells were assessed for CAR expression and used for cytotoxicity assays. At day 7 following double knockout of CD70 and a target genes (SMAD3, MAPKAPK3 [MK3], CEACAM1, DDIT4, A2AR, NKG2A, CISH), CD70 expression was reduced consistently among different conditions (FIG. 49B). At day 10 following double knockout (and NK71 CAR transduction at day 7), CD70 expression was essentially undetectable and NK71 expression was consistent among different conditions (FIG. 49C). NK cell populations gene edited for the targets were amplified at the targeted loci at their respective exons as shown in FIG. 49D. Gene loci amplicons were sequenced to determine indel frequency within the NK cell population (FIG. 49D).

[0344] SMAD3 was knocked out in an NK cell population expressing the NK71 CAR. Loss of SMAD3 protein was confirmed by Western blot as well as loss of phosphorylated SMAD3 signal after TGFb treatment (FIG. 49E). Cytotoxicity assays were performed with NK cell populations knocked out for SMAD3 or CISH and expressing the NK71 CAR, with or without treatment of 20 ng/ml TGFb (FIGS. 49F-49G). Unlike the CISH knockout population, the SMAD3 knockout could not overcome TGFb inhibition of NK71 cell cytotoxicity, as seen by the greater number of remaining tumor cells in the SMAD3 KO+TGFb treated condition compared to TGFb treated only condition.

[0345] A2AR was knocked out in an NK cell population expressing the NK71 CAR. Cytotoxicity assays were performed with NK cell populations knocked out for A2AR or CISH and expressing the NK71 CAR, with or without treatment of the adenosine receptor agonist NECA at 10 uM (FIG. 49H-49I). The results observed here were similar to those discussed above (e.g. FIG. 48). The cytotoxicity assay results suggest that A2AR knockout or CISH knockout may overcome NECA inhibition of NK71 cell cytotoxicity.

[0346] MAPKAPK3 (MK3) was knocked out in an NK cell population expressing the NK71 CAR. Cytotoxicity assays were performed with NK cell populations knocked out for MK3 or CISH and expressing the NK71 CAR (FIGS. 49J-49K). MK3 knockout moderately enhances NK cell cytotoxicity.

[0347] NKG2A was knocked out in an NK cell population expressing the NK71 CAR. Cytotoxicity assays were performed with NK cell populations knocked out for NKG2A or CISH (or MK3 for comparison) and expressing the NK71 CAR. NKG2A knockout increases NK cell cytotoxicity against 786-O tumor cells (FIGS. 49L-49N) under normal conditions. However, NKG2A knockout fails to overcome inhibition of NK cells when tested in either 20 ng/ml TGFb (1:1 E:T; FIG. 49O) or 10 μM NECA (1:2 E:T; FIG. 49P).

[0348] DDIT4 was knocked out in an NK cell population expressing the NK71 CAR. Cytotoxicity assays were performed with NK cell populations knocked out for DDIT4 or CISH and expressing the NK71 CAR (FIG. 49Q-49R). Cells were treated with 50 μM CoCl₂ to induce a hypoxic state, which induces DIT4 to inhibit mTor. DDIT4 knockout was not found to enhance NK cell cytotoxicity.

[0349] CEACAM1 was knocked out in an NK cell population expressing the NK71 CAR. Cytotoxicity assays were performed with NK cell populations knocked out for CEACAM1 or CISH and expressing the NK71 CAR (FIGS. 49S-49T). CEACAM5, which can be found on tumor cell surfaces and interacts with CEACAM1, was added at 1 μg/mL. CEACAM1 knockout was not found to enhance NK cell cytotoxicity.

[0350] NK cell populations edited to knock out CISH, A2AR, SMAD3, MK3, DDIT4, or CEACAM1 (over 42 days, FIG. 49U); or CISH or NKG2A (over 49 days, FIG. 49V) were assessed to observe NK cell proliferation and survival as measured by cell counts. CISH knockout was found to have the greatest benefit for NK cell survival at the final time point tested. Thus, in several embodiments, CISH is edited to impart beneficial effects to NK or T cells expressing one or more of the anti-CD70 CAR constructs disclosed herein. In additional embodiments, genes in addition to CISH are edited to provide further benefits, which in some embodiments synergistically work with those of CISH-edited cells to result in highly efficacious and persistent edited cells for use in CD70-expressing tumor therapy.

### Example 5—Anti-CD70 Binding Domain Screening and Characterization

[0351] As discussed above, various anti-CD70 binding domains were produced and evaluated for expression, cytotoxicity against target cells and otherwise were characterized according to the non-limiting methodologies and experiments described herein.

[0352] A pool of 1600 candidate anti-CD70 binding domains were screened to identify nearly 1000 unique scFvs. These were further screened based on their ability to bind either or both a monomer or trimer of CD70 epitopes and their ability to compete with (or block) binding of a known anti-CD70 binder to such CD70 epitopes. Testing against CD70 trimers allows for identification of binders selective for the naturally occurring trimeric conformation of CD70, whereas testing against CD70 monomers allows for selection of high affinity binders.

[0353] Based on the CD70 binding assays, 74 individual scFvs were identified and selected for further characterization. Non-limiting examples of nucleotide sequences for the selected scFvs are provided in SEQ ID NOs: 38-111. Non-limiting examples of nucleotide sequences for separate heavy chain variable regions (VH) of the selected scFvs are provided in SEQ ID NOs: 1038-1111. Non-limiting examples of nucleotide sequences for separate light chain variable regions (VL) of the selected scFvs are provided in SEQ ID NOs: 1112-1185. Peptide sequences for the selected scFvs are provided in SEQ ID NOs: 230-303. Peptide sequences for separate VH of the selected scFvs are provided in SEQ ID NOs: 890-963. Peptide sequences for separate VL of the selected scFvs are provided in SEQ ID NOs: 964-1037. It is envisioned that other nucleotide sequences that the ones provided (e.g. sequences having at least 80%, 85%, 90%, 95%, 96%, 97%, 98%, or 99% homology) can be translated to the same peptide scFv sequences as conventionally understood. Non-limiting examples of nucleic acid and peptide sequences for each of the 74 selected anti-CD70 scFvs are depicted in FIG. 50A.

[0354] Bivalent scFvs were prepared from some of the selected anti-CD70 scFvs. The bivalent scFvs that were prepared include: 1) NK77.38/NK77.38, 2) NK77.64/NK77.64, 3) NK77.65/NK77.65, 4) NK77.38/NK77.67, 5) NK77.38/NK77.68, 6) NK77.64/NK77.67, 7) NK77.64/NK77.68, 8) NK77.65/NK77.67, 9) NK77.65/NK77.68. The names of the bivalent combinations correspond to the nomenclature used for the monovalent scFvs as disclosed herein (e.g. in FIG. 50A). Non-limiting examples of nucleotide sequences for these bivalent scFvs are provided in SEQ ID NOs: 112-120. Corresponding peptide sequences for these bivalent scFvs are provided in SEQ ID NOs: 304-312.

[0355] Also provided are individual heavy chain variable region and light chain variable region complementarity determining regions (CDRs). Non-limiting examples of CDR-H1 are provided in SEQ ID NOs: 428-501. Non-limiting examples of CDR-H2 are provided in SEQ ID NOs: 502-575. Non-limiting examples of CDR-H3 are provided in SEQ ID NOs: 576-649. Non-limiting examples of CDR-L1 are provided in SEQ ID NOs: 668-741. Non-limiting examples of CDR-L1 are provided in SEQ ID NOs: 742-815. Non-limiting examples of CDR-L1 are provided in SEQ ID NOs: 816-889. Combinations for each of the selected anti-CD70 scFvs are provided in FIG. 50B. It is envisioned that other anti-CD70 scFvs (or sdAbs) can be produced by other combinations of the heavy chain and light chain CDRs provided herein.

[0356] The anti-CD70 scFvs disclosed herein are produced within immunoglobulin frameworks conventionally known in the art. For example, each heavy chain variable region and light chain variable region framework used has 4 framework sequences (FW-1, FW-2, FW-3, FW-4) in which the three CDRs are provided. Non-limiting examples of FW-H1 are provided in SEQ ID NOs: 399-402. Non-limiting examples of FW-H2 are provided in SEQ ID NOs: 403-406. Non-limiting examples of FW-H3 are provided in SEQ ID NOs: 407-422. Non-limiting examples of FW-H4 are provided in SEQ ID NOs: 423-427. Non-limiting examples of FW-L1 are provided in SEQ ID NOs: 650-653. Non-limiting examples of FW-L2 are provided in SEQ ID NOs: 654-657. Non-limiting examples of FW-L3 are provided in SEQ ID NOs: 658-661. Exemplary FW-L4 are provided in SEQ ID NOs: 662-667. It is envisioned that alternative frameworks may be substituted for any of the frameworks disclosed herein as understood by one skilled in the art.

[0357] CARs were prepared from these selected 74 anti-CD70 scFvs. The CARs were constructed with the anti-CD70 scFv, a CD8a hinge, a CD8a transmembrane domain, an OX40 subdomain, and a CD3zeta subdomain, as depicted in FIG. 6, however, according to additional embodiments, other domains disclosed herein may also be used (e.g., 4-1BB, CD28, etc.). Non-limiting examples of nucleotide sequences for the monovalent CARs are provided in SEQ ID NOs: 138-211. Non-limiting examples of nucleotide sequences for the bivalent CARs are provided in SEQ ID NOs: 212-220. Additional non-limiting examples of codon-optimized sequences for the bivalent CARs are provided in SEQ ID NOs: 221-229. Corresponding peptide sequences for the monovalent CARs are provided in SEQ ID NOs: 313-386. Corresponding peptide sequences for the bivalent CARs are provided in SEQ ID NOs: 387-395.

[0358] These initial 74 CARs were assayed for tonic signaling and activation capability in Jurkat cells. A schematic for this is depicted in FIG. 50C. Briefly, Jurkat cells that previously have been gene edited to knock out CD70 are transduced with a standard titer of virus harboring anti-CD70 CAR genetic sequences, expanded, and the cultured either alone (to test tonic signaling) or co-cultured with tumor cells to test CAR-mediated activation. Activation was measured by CD69 expression. Most of the prepared anti-CD70 CARs do not exhibit substantial tonic signaling, with the exception of clones NK77.48 and two bivalent CARs NK77.78 (NK77.65 duplicate bivalent) and NK77.83 (NK77.65/NK77.67 bivalent) (FIG. 50D). The ratio of activation after tumor cell co-culture to tonic signaling indicates which constructs function efficiently to transduce immune cell activation (FIG. 50E). From this screening, a set of 10 CAR constructs (NK77.11, NK77.16, NK77.17, NK77.31, NK77.44, NK77.55, NK77.58, NK77.65, NK77.71, NK77.73) (FIG. 50F). The majority of anti-CD70 CARs tested in subsequent assays are part of this set of 10 selected CARs, although any of the anti-CD70 CARs disclosed herein, in any combination, may be similarly assayed and/or used in a cell therapy composition or method disclosed herein.

[0359] In some embodiments, also provided herein are nucleic acid or amino acid sequences that have sequence identity and/or homology of at least 80%, 85%, 90%, 95%, 96%, 97%, 98%, 99% (and ranges therein) as compared with the respective nucleic acid or amino acid sequences of SEQ ID NOS. 138-395 (or combinations of two or more of SEQ ID NOS: 138-395) and that also exhibit one or more of the functions as compared with the respective SEQ ID NOS. 138-395 (or combinations of two or more of SEQ ID NOS: 138-395) including but not limited to, (i) enhanced proliferation, (ii) enhanced activation, (iii) enhanced cytotoxic activity against cells presenting ligands to which NK cells harboring receptors encoded by the nucleic acid and amino acid sequences bind, (iv) enhanced homing to tumor or infected sites, (v) reduced off target cytotoxic effects, (vi) enhanced secretion of immunostimulatory cytokines and chemokines (including, but not limited to IFNg, TNFa, IL-22, Perforin, CCL3, CCL4, and CCL5), (vii) enhanced ability to stimulate further innate and adaptive immune responses, and (viii) combinations thereof.

### Example 6—Anti-CD70 CAR Screening and Characterization

[0360] Several in vitro experimental examples are provided herein to characterize and validate cytotoxic ability of the anti-CD70 CAR constructs expressed by CD70-deficient NK cells.

[0361] As shown in FIGS. 51A-51B, NK cells from one donor (denoted donor 451) were transduced to express anti-CD70 CARs and gene edited to reduce expression of CD70. Constructs NK77.55, NK77.58, NK77.65, NK77.71, and NK77.73 were tested, though (as throughout the disclosure, unless otherwise indicated) any of the CD70 CARs disclosed herein may be used, depending on the embodiment. Flow cytometry plots detecting the anti-CD70 CAR (by allophycocyanin (APC)-conjugated anti-FLAG antibody) and loss of CD70 expression (by phycoerythrin (PE)-conjugated anti-CD70 antibody) shows variability among tested CAR constructs expressed by NK cell populations (FIG. 51A). Clones with higher transduction efficiencies (e.g. NK77.58 and NK77.71) exhibited greater killing of CD70+NK cells (i.e. where the CD70 knockout was unsuccessful or incomplete), resulting in the low abundance of CD70+ cells in the plots (FIG. 51B). NK8 refers to a control construct expressing GFP instead of a CAR/mbIL15.

[0362] As shown in FIGS. 52A-52D, NK from another donor (denoted donor 454) were transduced to express anti-CD70 CARs and gene edited to lose expression of CD70. Constructs NK77.55, NK77.58, NK77.65, NK77.71, and NK77.73 were tested, with no transduction and NK71 construct as controls. Flow cytometry plots detecting the anti-CD70 CAR (APC-anti-FLAG) and loss of CD70 expression (PE-anti-CD70) shows robust expression of the anti-CD70 CARs and virtually no CD70+ cells (FIG. 52A). High frequency of CAR transduction and low CD70+ abundance suggests that the transduced NK cells killed off any remaining CD70+ cells where the CD70 knockout was either unsuccessful or incomplete (FIG. 52B). Measurement of the raw mean fluorescence intensity (MFI) suggests that while transduction efficiency was high, relative expression levels per cell for each CAR may vary (FIG. 52C). CAR NK cells of this set were subjected to a cytotoxicity assay against 786-O cancer cells at varying effector:target (E:T) ratios and the EC₅₀ was calculated. The NK71 CAR was used as a control. Each tested CAR resulted in EC₅₀ ranging from about 0.25 E:T or lower, indicating that these CAR NK cells were effective in clearing co-cultured tumor cells.

[0363] As shown in FIGS. 53A-53F, the CAR NK cells from donor 454 (seen in FIG. 52) were subjected to cytotoxicity assays. As provided above, anti-CD70 CARs NK77.55, NK77.58, NK77.65, NK77.71, and NK77.73 were tested, with NK71 as a control. Cytotoxicity was tested at E:T ratios of 1:2 (FIGS. 53A-53C), 1:4 (FIGS. 53D-53E), and 1:8 (FIG. 53F). For the 1:2 ratio condition, the NK cells were re-challenged with additional tumor cells at day 7, and cytotoxicity was continued to be measured until day 10 (FIG. 53C). Each of the tested anti-CD70 CAR constructs resulted in increased cytotoxicity of the 786-O cells relative to the negative control. Constructs NK77.58 and NK77.71 consistently had the greatest relative cytotoxicity over the other CARs and the positive control CAR NK71.

[0364] As shown in FIGS. 54A-54D, the CAR NK cells from donor 454 (seen in FIGS. 52, 53) or similarly transduced to NK92 (an immortalized NK cell-like cell line) were subjected to additional cytotoxicity assays. NK cell populations with NK77.58 and NK77.71 were tested, as a non-limiting example, as they had the greatest activity as seen in FIG. 53. Cytotoxicity was tested at E:T ratios of 1:2 (FIGS. 54A-54B) or 1:4 (FIGS. 54C-54D) against either 786-O expressing GFP or ACHN cells stained with NucRed. Cytotoxicity of these two CAR constructs is consistent among the different conditions, resulting in substantial reduction of tumor cells relative to negative controls. Only the NK71 transduced to NK92 cells was found to have greater cytotoxicity compared to these two constructs.

[0365] As shown in FIGS. 55A-55M, additional anti-CD70 CARs were tested with NK cells from donor 451. CD70 knockout NK cells from donor 451 were transduced to express constructs NK77.11, NK77.16, NK77.17, NK77.31, and NK77.44, with NK71 as a positive control. Flow cytometry plots detecting the anti-CD70 CAR (APC-anti-FLAG) and loss of CD70 expression (PE-anti-CD70) shows robust expression of the CARs and negligible presence of CD70+ cells (FIG. 55A). These CAR NK cells were subjected to a cytotoxicity assay against 786-O cells at varying E:T ratios and the EC₅₀ was calculated (FIGS. 55B-55C). Constructs NK77.11, NK77.16, NK77.17, NK77.31, and NK77.44 had EC₅₀ ranging from about 0.5-0.63, which was lower than the EC₅₀ measured for the NK71 construct. NK77.44 resulted in an EC₅₀ of about 1.5, which may suggest lower cytotoxic efficacy. These CAR NK cells were further subjected to a time course cytotoxicity assay at either E:T ratios of 1:2 (FIGS. 55D-55I) or 1:4 (FIGS. 55J-55M). For longer time periods, the NK cell cultures were re-challenged with additional tumor cells (FIGS. 55G and 55M). In this case, re-challenge was at day 7, and cytotoxicity was measured until day 11. Each of the tested anti-CD70 CARs resulted in cytotoxicity relative to negative control. Construct NK77.11 performed the best overall. As suggested by the EC₅₀ data of FIGS. 55B-55C, NK77.44 did not perform as well as the other tested CARs. Interestingly, control CAR NK71 performed the best for earlier time points, but after re-challenge and longer culture, NK71 did not perform as well as the experimental CAR constructs, potentially suggesting improved persistence of these constructs.

[0366] As shown in FIGS. 56A-56J, the same additional anti-CD70 CARs tested in FIGS. 55A-55M were tested with NK cells from donor 454. CD70 knockout NK cells from donor 454 were transduced to express constructs NK77.11, NK77.16, NK77.17, NK77.31, and NK77.44, with NK71 as a positive control. Flow cytometry plots detecting the anti-CD70 CAR (APC-anti-FLAG) and loss of CD70 expression (PE-anti-CD70) shows robust expression of the CARs and negligible presence of CD70+ cells (FIG. 56A). These CAR NK cells were subjected to a cytotoxicity assay against 786-O cells at varying E:T ratios and the EC₅₀ was calculated (FIGS. 56B-56C). Consistent with what was seen with donor 451 (FIGS. 55B-55C), the EC₅₀ for NK77.11, NK77.16, NK77.17, and NK77.31 were generally lower than that of NK71, while NK77.44 was higher. These CAR NK cells were further subjected to a time course cytotoxicity assay at E:T ratios of 1:2 (FIGS. 56D-56E), 1:4 (FIGS. 56F-56H), or 1:8 (FIGS. 56I-56J). For the 1:2 ratio, the NK cell cultures were re-challenged with additional tumor cells at day 6 with cytotoxicity measurements until day 10 (FIG. 56E). As seen in FIG. 55, the CAR constructs resulted in cytotoxicity relative to negative control. Construct NK77.11 still generally performed well, but in some cases, construct NK77.17 resulted in even greater cytotoxicity. In the longer time period test with re-challenge, the control NK71 did not perform as well as in FIGS. 55G and 55M, with most tested CARs having greater cytotoxicity both before and after the re-challenge. This variability may be due to the NK cell donor source tested or variable CAR transduction

[0367] As shown in FIGS. 57A-57H, the CAR NK cells from donor 451 (seen in FIG. 55) were subjected to additional cytotoxicity assays. All CARs tested in FIG. 55 (NK77.11, NK77.16, NK77.17, NK77.31, NK77.44) were tested. Cytotoxicity was tested at E:T ratios of 1:2 (FIGS. 57A-57E) or 1:4 (FIGS. 57F-57H) against ACHN cells. Cytotoxicity of the tested CARs is consistent with what is seen in FIG. 55.

[0368] As shown in FIGS. 58A-58H, the CAR NK cells from donor 454 (seen in FIG. 56) were subjected to additional cytotoxicity assays. All CARs tested in FIG. 56 (NK77.1, NK77.16, NK77.17, NK77.31, NK77.44) were tested. Cytotoxicity was tested at E:T ratios of 1:4 (FIGS. 58A-58E) or 1:8 (FIGS. 58F-58H) against ACHN cells. Cytotoxicity of the tested CARs is consistent with what is seen in FIG. 56.

[0369] As shown in FIGS. 59A-59D, NK cells from donor 451 were transduced to express the 10 anti-CD70 CARs shown in FIG. 50G and gene edited to lose expression of CD70. Constructs NK77.11, NK77.16, NK77.17, NK77.31, NK77.44, NK77.55, NK77.58, NK77.65, NK77.71, NK77.73 were tested, with NK71 as a positive control. These CAR constructs were also tested in the previous experiments provided in this example. Flow cytometry plots detecting the anti-CD70 CAR (APC-anti-FLAG) and loss of CD70 expression (PE-anti-CD70) shows expression of each of the 10 tested CARs and negligible presence of CD70+ cells (FIG. 59A). High frequency of CAR transduction and low CD70+ abundance suggests that the transduced NK cells killed off any remaining CD70+ cells where the CD70 knockout was either unsuccessful or incomplete (FIG. 59B). Measurement of the raw MFI suggests that while transduction efficiency was high, relative expression levels per cell for each CAR may vary (FIG. 59C). CAR NK cells were subjected to a cytotoxicity assay against 786-O cancer cells at varying E:T ratios and the EC₅₀ was calculated. While there is some variability in the calculated EC₅₀ compared to the previous experiments (such as the EC₅₀ for NK77.44, which appears to be competitive here but higher in FIGS. 55C and 56C), this indicates that these selected anti-CD70 CARs confer cytotoxic activity relative to negative control.

[0370] As shown in FIGS. 60A-60O, the NK cells from donor 451 as seen in FIG. 59 with the 10 anti-CD70 CARs were subjected to additional cytotoxicity assays. Cytotoxicity was tested at E:T ratios of 1:2 against 786-O (FIGS. 60A-60D), 1:2 against ACHN (FIGS. 60E-60H), 1:4 against 786-O (FIGS. 60I-60L) or 1:4 against ACHN (FIGS. 60M-60P). All of the tested CARs confer cytotoxicity compared to negative control. Based on these cytotoxicity assays, it generally appears that anti-CD70 CAR constructs NK77.11, NK77.16, NK77.17, NK77.31, NK77.58, NK77.71 have greater cytotoxicity compared to the NK71 CAR control. Conversely, NK77.55, NK77.65, and NK77.73 do not perform better than the NK71 control, and NK77.44 experiences some variability in this aspect.

[0371] As shown in FIGS. 61A-61O, NK cells from another donor (denoted donor 512) were transduced to express anti-CD70 CARs and gene edited to lose expression of CD70. Flow cytometry plots show a lower percentage of NK cells expressing CD70 after transfection of CD70-directed CRISPR/Cas9 knockout constructs (FIG. 61A). All 10 CAR constructs seen in FIG. 50G (NK77.11, NK77.16, NK77.17, NK77.31, NK77.44, NK77.55, NK77.58, NK77.65, NK77.71, NK77.73) were tested, with NK71 as positive control. Flow cytometry pots show robust expression of the CAR and negligible presence of CD70+ cells (FIG. 61B). High frequency of CAR transduction and low CD70+ abundance suggests that the transduced NK cells killed off any remaining CD70+ cells where the CD70 knockout was either unsuccessful or incomplete (FIG. 61C). Measurement of the raw MFI suggests that while transduction efficiency was high, relative expression levels per cell for each CAR may vary (FIG. 61D). CAR NK cell populations with NK77.11, NK77.16, NK77.17, NK77.58, and NK77.71 were tested for persistence of the CAR over time. Over a three week period, these tested CARs were robustly maintained, while the NK71 control experienced some reduction in expression over the same length of time (FIGS. 61E-61J). In a cytotoxicity assay, the tested NK constructs NK77.11, NK77.16, NK77.17, NK77.58, and NK77.71 in donor 512 NK cells all exhibited greater cytotoxicity at E:T ratios of either 1:2 or 1:4 against 786-O cells (FIGS. 61K-61L) or ACHN cells (FIGS. 61M-61N) relative to NK71 control and negative control. These anti-CD70 CAR constructs were the ones that performed the best in the previous experiments disclosed herein.

[0372] As shown in FIGS. 62A-62B, NK cell survival is not affected by expression of anti-CD70 CAR constructs. NK cells from either donor 451 or 512 that were transduced with the anti-CD70 constructs NK77.11, NK77.16, NK77.17, NK77.58, or NK77.71 were cultured over a 5 week span and total viable cells were quantified every week. NK cells expressing the anti-CD70 CAR persisted comparably to control cells (FIGS. 62A-62B).

[0373] As shown in FIGS. 63A-63B, NK cells from donor 512 (seen in FIGS. 61 and 62) were gene edited to knockout CD70 and optionally CISH, transduced with anti-CD70 CAR constructs, and subjected to cytotoxicity assays. Constructs NK77.17, NK77.58, and NK77.71 were tested. Cytotoxicity was tested at an E:T ratio of 1:8 against either 786-O cells (FIG. 63A) or ACHN cells (FIG. 63B). Each anti-CD70 CAR construct was effective in conferring tumor cytotoxic effects to the NK cells. These data show that anti-CD70 CAR expressing cells according to several embodiments disclosed herein are effective at controlling and/or reducing tumor cell growth. According to several embodiments, gene editing of the cells expressing the anti-CD70 CAR (e.g., CISH editing) further enhances one or more aspects of the engineered cells, including but not limited to cytotoxicity and/or persistence.

### Example 7—Further Screening of Anti-CD70 CARs and Related Characterization

[0374] Additional experiments were performed to further evaluate the characteristics of cells that are engineered to express anti-CD70 CARs and edited to knockout CD70 expression, and optionally are further edited in respect of one or more of the additional editing targets disclosed herein, such as CISH. Cells, as a non-limiting example, donor-derived NK cells are used, were engineered and edited as discussed herein.

[0375] Initially, NK cells engineered and edited according to embodiments disclosed herein were tracked over time in two respects—first for target binding ability of the expressed CD70 CAR over time and for the durability CD70 knockout over time—in other words, the persistence of the engineering and editing. FIG. 64A shows the data for a first donor's NK cells with respect to the ability of the CD70 CAR to bind the naturally occurring CD70 trimer. As shown, the electroporation-only control NK cells (EPNT) show essentially zero binding of the trimer (see Trimer+2^{nd} panel in lower right of 64A). In contrast, each of non-limiting CD70 CAR construct-expressing NK cell populations showed robust binding to the trimer. This assessment was performed 1 week after transducing the cells with the CAR construct. FIG. 64B shows corresponding data from a second donor. FIG. 64C and FIG. 64D provide a table that depicts summary data for each of the CAR constructs, with the data presented as both the percentage of cells expressing a CAR that can bind the CD70 trimer (out of the entire population of CD70 cells evaluated) and also as the MFI value. Reflecting the flow cytometry scatter plots, the numerical data confirms expression of CARs capable of binding their target at one week post-transduction. FIGS. 64E and 64F show this data graphically, with CAR constructs NK77.71, 77.11 and 77.16 showing the highest ability to bind their target.

[0376] Turning to the knockout of CD70, FIG. 64G shows that, for donor one, endogenous CD70 expression is near zero for all experimental groups, as compared to the EPNT control. FIG. 64H confirms the same effect for donor two. FIGS. 641 and 64J show the numerical data for CD70 expression, both by the percentage of the total NK cell population that express CD70, as well as MFI. As shown, the CD70-edited cells expressing any of the non-limiting examples of CD70 CARs express vastly lower amounts of CD70, as compared to the unedited EPNT CD70 controls, for both donors.

[0377] FIG. 65A shows data related to the first donor's cells at two weeks post-transduction in terms of the ability of the cells to bind the native CD70 trimer. As was seen at 1-week post-transduction, the ability of the CAR-expressing cells to bind the target was significant in comparison to EPNT cells, and even in comparison to NK71-expressing cells. Similar maintenance of ability to bind is shown in FIG. 65B, for the second donor. These data are tabulated in FIGS. 65C and 65D for each donor, expressed both as the percentage of the NK cell population expresses the CAR that binds the native CD70 trimer and based on the MFI detected. FIGS. 65E and 65F graphically depict this summary data for each donor, with CAR constructs NK77.71, 77.11 and 77.16 again showing the highest ability to bind their target.

[0378] Turning to the knockout of CD70, FIG. 65G shows that, for donor one, endogenous CD70 expression is near zero for all experimental groups, as compared to the EPNT control. FIG. 65H confirms the same effect for donor two. FIGS. 65I and 65J show the numerical data for CD70 expression, both by the percentage of the total NK cell population that express CD70, as well as MFI. As shown, the CD70-edited cells expressing any of the non-limiting examples of CD70 CARs express vastly lower amounts of CD70, as compared to the unedited EPNT CD70 controls, for both donors.

[0379] FIG. 66A shows data related to the first donor's cells at three weeks post-transduction in terms of the ability of the cells to bind the native CD70 trimer. As was seen at 1-week and 2-week post-transduction, the ability of the CAR-expressing cells to bind the target was significant in comparison to EPNT cells, and even in comparison to NK71-expressing cells. Similar maintenance of ability to bind is shown in FIG. 66B, for the second donor. These data are tabulated in FIG. 66C for each donor, expressed both as the percentage of the NK cell population expresses the CAR that binds the native CD70 trimer and based on the MFI detected. FIGS. 66D and 66E graphically depict this summary data for each donor, with CAR constructs NK77.71, 77.11 and 77.16 again showing the highest ability to bind their target.

[0380] Turning to the knockout of CD70, FIG. 66F shows that, for donor one, endogenous CD70 expression is near zero for all experimental groups, as compared to the EPNT control. FIG. 66G confirms the same effect for donor two. FIGS. 66H and 66I show the numerical data for CD70 expression, both by the percentage of the total NK cell population that express CD70, as well as MFI. As shown, the CD70-edited cells expressing any of the non-limiting examples of CD70 CARs express vastly lower amounts of CD70, as compared to the unedited EPNT CD70 controls, for both donors.

[0381] FIG. 67A shows data related to the first donor's cells at four weeks post-transduction in terms of the ability of the cells to bind the native CD70 trimer. As was seen at 1-week, 2-week, and three-week post-transduction, the ability of the CAR-expressing cells to bind the target was significant in comparison to EPNT cells, and even in comparison to NK71-expressing cells. Similar maintenance of ability to bind is shown in FIG. 67B, for the second donor. These data are tabulated in FIGS. 67C and 67D for each donor, expressed both as the percentage of the NK cell population expresses the CAR that binds the native CD70 trimer and based on the MFI detected. FIGS. 67E and 67F graphically depict this summary data for each donor, with CAR constructs NK77.71, 77.11 and 77.16 again (and also 77.58) showing the highest ability to bind their target.

[0382] Turning to the knockout of CD70, FIG. 67G shows that, for donor one, endogenous CD70 expression is near zero for all experimental groups, as compared to the EPNT control. FIG. 67H confirms the same effect for donor two. FIGS. 67I and 67J show the numerical data for CD70 expression, both by the percentage of the total NK cell population that express CD70, as well as MFI. As shown, the CD70-edited cells expressing any of the non-limiting examples of CD70 CARs express vastly lower amounts of CD70, as compared to the unedited EPNT CD70 controls, for both donors.

[0383] FIG. 68A shows data related to the first donor's cells at five weeks post-transduction in terms of the ability of the cells to bind the native CD70 trimer. As was seen for weeks 1 through 4 post-transduction, the ability of the CAR-expressing cells to bind the target was significant in comparison to EPNT cells, and even in comparison to NK71-expressing cells. Similar maintenance of ability to bind is shown in FIG. 68B, for the second donor. These data are tabulated in FIGS. 68C and 68D for each donor, expressed both as the percentage of the NK cell population expresses the CAR that binds the native CD70 trimer and based on the MFI detected. FIGS. 678 and 68F graphically depict this summary data for each donor, with CAR constructs NK77.71, 77.11 and 77.16 again showing the highest ability to bind their target.

[0384] Turning to the knockout of CD70, FIG. 68G shows that, for donor one, endogenous CD70 expression is near zero for all experimental groups, as compared to the EPNT control. FIG. 68H confirms the same effect for donor two. FIG. 68I shows the numerical data for CD70 expression, both by the percentage of the total NK cell population that express CD70, as well as MFI. As shown, the CD70-edited cells expressing any of the non-limiting examples of CD70 CARs express vastly lower amounts of CD70, as compared to the unedited EPNT CD70 controls, for both donors.

[0385] FIG. 69A shows data related to the first donor's cells at seven weeks post-transduction in terms of the ability of the cells to bind the native CD70 trimer. As was seen for weeks 1 through 5 post-transduction, the ability of the CAR-expressing cells to bind the target was significant in comparison to EPNT cells, and even in comparison to NK71-expressing cells. Similar maintenance of ability to bind is shown in FIG. 69B, for the second donor. These data are tabulated in FIG. 69C for both donors, expressed both as the percentage of the NK cell population expresses the CAR that binds the native CD70 trimer and based on the MFI detected. FIGS. 69D and 69E graphically depict this summary data for each donor, with CAR constructs NK77.71, 77.11 and 77.16 again showing the highest ability to bind their target.

[0386] Turning to the knockout of CD70, FIG. 69F shows that, for donor one, endogenous CD70 expression is near zero for all experimental groups, as compared to the EPNT control. FIG. 69G confirms the same effect for donor two. FIG. 69H shows the numerical data for CD70 expression, both by the percentage of the total NK cell population that express CD70, as well as MFI. As shown, the CD70-edited cells expressing any of the non-limiting examples of CD70 CARs express vastly lower amounts of CD70, as compared to the unedited EPNT CD70 controls, for both donors.

[0387] FIGS. 70A-70B show data related to CAR expression (by MFI) over the course of the 7 weeks post-transduction for the indicated non-limiting CAR constructs. These data confirm that, as compared to controls, the selected non-limiting CAR constructs exhibited elevated CAR expression. Importantly, as in the prior figures, this is also expression of functional CARs (as shown with CD70 trimer binding). Thus, according to several embodiments, CAR constructs as disclosed herein exhibit durable expression and function over extended periods in culture. Advantageously, in several embodiments, this stable expression imparts to the cells expressing the CAR (such as an NK cell) an elongated functional life span in vivo, which, in turn, lends to the longer effective treatment of a tumor against which the CAR is directed.

[0388] Additional data characterizing cells expressing the CARs was collected. At Day 14 after inception of the cell production process (e.g, electroporation for gene editing, followed by transduction with a vector encoding a particular CAR construct), and again at day 28 after inception of the cell production process, NK cells expressing the indicated anti-CD70 CAR constructs (and also edited to knockout endogenous CD70 expression) were cocultured at the indicated E:T ratio with either 786-O tumor cells or ACHN tumor cells (experimental setup as discussed elsewhere herein). After 3 days of coculture, the culture media was assessed for concentrations of selected cytokines. FIG. 71A shows levels of interferon gamma in the media of co-cultures with 786-O (71A) or ACHN (71B) cells. As shown, the cytokine release level was elevated in the 14-day cell batches, with interferon production decreasing over time to day 28. Even at 28 days after inception of the cell production process, certain CAR constructs, such as NK77.71, still induced release of relatively elevated interferon gamma levels, particular as compared to ACHN cells also or electroporation negative controls. FIGS. 71C-71D show corresponding data for the second donor tested, with a similar overall profile of interferon gamma release, in that there was a trend to decreasing amounts of interferon production as the cells remained in culture longer, although in most groups, the degree of release was still elevated over control.

[0389] FIGS. 71E-71F show data related to detection of GM-CSF at the same time points as described above. Interestingly, the edited and engineered NK cells shows a trend towards increase GMCSF production over time, with most of the constructs tested resulting in elevated levels of GMCSF at day 28, as compared to corresponding points at day 14. There was some amount of de novo production of GMCSF from the 786-O and ACHN cells on their own, but those levels were constant over time, indicating that the GMCSF release is likely induced through the coculture with the tumor cells and reflective of the cytotoxic activation of the NK cells. FIGS. 71G-71H show corresponding data for the second donor tested, with a similar overall profile of GMCSF release.

[0390] FIGS. 71I-71J show data related to the levels of TNF alpha in the culture media from donor one after coculture as described above. In this experiment, the levels of TNF alpha generally trended up between 14 and 28 days, though certain CAR-expressing cells remained more steady between the two time points. Similar data were for donor two, at least with respect TNF alpha release during coculture with ACHN cells. The general trend for TNF alpha release in donor two was downward between the 14 and 28 day time points. In several embodiments, this may be an artifact of the overall cytokine milieu in the co-culture, in that increases, or decreases, in just one cytokine in isolation may be accounted for based on corresponding increases or decreases of other cytokines.

[0391] Similar changes in the trend of cytokine production are also shown in FIGS. 71M-71N (donor one, perforin release) and FIGS. 71O-71P (donor two, perforin release). While donor one showed a clear trend to increasing perforin release with time in culture (against both tumor cell types), donor two showed a general trend to decreased perforin release between the 14 and 28 day time points. As discussed above with respect to TNF alpha, the overall cytokine release profile is one aspect of the overall cytotoxic effects a given cell delivers, and there may be donor to donor variability in terms of what an individual batch of cells exhibits in terms of the profiles of any given cytokine in isolation.

[0392] FIGS. 71Q-71R (donor one) and 71S-71T (donor two) related to Granzyme B production at the two coculture time points. Generally, Granzyme B levels remained steady or were increased between the 14 and 28 day timepoints for both donors and with respect to both types of tumor cells. Taken together, these data demonstrate that edited and engineered immune cells, such as NK cells, retain the capacity to release cytotoxic cytokines, even after nearly 1 month in culture, indicating that the gene edits (e.g., gene knockout) are stable, the CAR expression is stable, and the CAR function is stable. Altogether, these impart to the edited and engineered cells an enhanced degree of persistence and cytotoxicity, leading to a more effective cellular immunotherapy product.

[0393] In several embodiments, more than one gene edited is made. For example, in some embodiments, an endogenous gene is knocked out that improves the survival of the edited cells, such as removing expression of a marker or protein that has overlap with a tumor marker being targets (e.g., CD70). In several embodiments, other genes are also edited. In several embodiments, CISH is edited (as discussed in more detail above). In several embodiments, multiple edits act through enhanced signaling or disrupted signaling along one or more non-redundant pathways to enhance the viability, persistence and/or cytotoxicity of the resultant immune cells. FIGS. 72A-72B show data related to the in vitro persistence of cells edited for both CD70 and CISH knockout, and expressing anti-CD70 CARs as measured by the percentage of the cell population expressing the CAR (72A) and by overall MFI detected (72B). As compared to control cells (electroporated, but not transduced with a CAR), these edited and engineered cells display enhanced persistence in culture, with notably elevated levels of CAR expression over time (week 1 timepoint is two weeks post-transduction, 20 days post-electroporation). Regardless of the method by which the expression is measured, the indicated CAR constructs were relatively stably expressed over 8 weeks in culture, demonstrating the persistence of expression. Not only is the expression stable over time, but the additional edit of CISH imparts an enhanced survival to the edited cells. FIG. 72C shows longitudinal survival data over 8 weeks of culture (assessed at 0 weeks (inception of culture), 4 weeks, and 8 weeks). As shown based on total cell count, the cells that are further edited to knock out CISH (CIS protein expression substantially or completely eliminated) show improved survival (right panels) as compared to cells edited for CD70. This is in line with several embodiments disclosed herein, in that the multiple edits add synergistic improvements to one or more characteristics of the edited cells.

[0394] Turning to the cytotoxicity of the various anti-CD70 CAR expressing cells, FIG. 72D shows cytotoxicity profiles (experimental setup discussed elsewhere herein) for the cells of one donor against 786-O tumor cells. As can be seen from the data, the addition of any CAR construct results in a dramatic reduction in the tumor cell population. The tested cells (edited CD70 and in paired groups, doubly edited for CD70 and CISH) showed a CISH-editing-dependent increase in the overall cytotoxicity at the final timepoint measured. Thus, in several embodiments, immune cells, such as NK cells, are doubly edited (or edited at a greater number of targets) for knocking out CISH and another endogenous target (here CD70 as a non-limiting example), with the CISH edit imparting an enhanced functionality (e.g., persistence and/or cytotoxicity) to the resulting cell. FIG. 72E summarizes the cytotoxicity curve data in a histogram that depicts the detection of tumor cell fluorescent signal at the final time point. CD70 edited cells are shown on the left panel while doubly edited cells (CD70 and CISH) are shown on the right. Each of the matched pairs show a reduction in the presence of tumor cells with the additional edit of CISH, indicating that CISH knockout by gene editing enhances the cytotoxicity of such edited NK cells expressing a cytotoxic CAR.

[0395] FIGS. 72F and 72G show data related to the edited cells as tested at E:T of 1:4 against ACHN or 786-O cells at day 14 after inception of the cell production process. Data are shown for the final time-point but not for the interim points (e.g., cytotoxicity curves are not shown). Corresponding data for 1:8 E:T ratios are shown in FIGS. 72H-721. Regardless of whether the E:T is higher or lower, the data repeatedly show the editing to knock out CISH results in modest to notable further increases in the cytotoxicity of a given NK cell population edited for CD70 knockout and expression of an anti-CD70 CAR.

[0396] As was performed in several prior examples, gene edited and engineered immune cells (e.g., NK cells) were assayed in a rechallenge format, wherein the experimental cells are introduced to a new dose of tumor cells at an interim timepoint during co-culture. FIG. 72J shows rechallenge data for ACHN cells at a 1:4 E:T while 72K shows the corresponding data for 786-O cells (at day 14 after inception of the cell production process). Consistent with the data just described above, the additional edit of CISH resulted in modest to notable increases in the cytotoxicity (as measured by remaining tumor cell signal at the final timepoint). FIGS. 72L and 72M show corresponding data for 1:8 E:T ratios for each target tumor cell type. At the lower effector cell ratio, the reduction in tumor cell numbers over the first portion of the experiment was consistent, but tumor cells trended to increases in numbers after re-challenge. However, despite this trend, within an experimental pair, again, the CISH knockout editing resulted in relatively consistent enhancements in cytotoxicity.

[0397] Additional cytotoxicity analyses were performed at longer time points, in particular day 21 and day 28 after inception of the cell production process to edit CD70 and either edited for CISH, or not, followed by transduction with the indicated non-limiting CAR constructs. A rechallenge format was used here as well. Summarized data are presented both for time-points just prior to rechallenge as well as for the final time point (cytotoxicity curves are not shown). FIGS. 72A and 73B show data for the indicated CD70-CAR constructs expressed by NK cells (initial co-culture at 21 days after inception of the cell production process) and the cytotoxic effects against 786-O cells as measured after 72 hours of co-culture at either 1:4 (73A) or 1:8 (73B) E:T ratio. While discerning notable differences across all constructs is difficult in those that yielded the most significant cytotoxicity, positive impact of CISH editing can be seen in those with less robust cytotoxicity (noting that all CD70 CAR expressing cells were significantly more effective than control cells. For example the NK77.17 construct exhibited a decrease in the signal detected between the non-edited population (1^{st} histogram bar in 73A) and the CISH edited population (5^{th} histogram bar in 73A. At a reduced effector cell concentration (73B) a general stable to downward trend in signal detection (indicative of increased cytotoxicity) was observed.

[0398] FIGS. 73C and 73D show the corresponding data collected 6 days after the rechallenge. As shown at both the 1:4 and 1:8 E:T ratios the gene editing to knockout CISH resulted in notable decreases in tumor cells at either ratio tested. This increase in cytotoxicity with CISH editing is particularly notable in the rechallenge context, as fresh tumor cells were introduced, yet the edited cells were able to substantially inhibit tumor cell growth.

[0399] FIGS. 73E and 73F show data at 72 hours after inception of co-culture of the NK cells (edited or not) with ACHN cells (21 days after inception of the cell production process) at 1:4 (73E) or 1:8 (73F) E:T ratios. As with the 786-O cells discussed above, CISH editing did not show major changes in those construct where cytotoxicity was already quite robust. Again, NK77.17, which allowed more tumor growth than the other CAR constructs, at least in this experiment, showed a noticeable reduction in signal (enhanced cytotoxicity) with the editing to knockout CISH. At the lower, 1:8 E:T, increased cytotoxicity was seen with each of the test constructs (other than internal control NK71). FIGS. 73G and 73H show the data collected at the final time point, 6 days post-rechallenge. Seen in both the 1:4 and 1:8 E:T ratios, in each instance, CISH knockout resulted in a notable reduction in tumor burden at the final timepoint. These data, in combination with the other data discussed herein, are indicative of the positive effects of CISH editing on the persistence and cytotoxicity of the cells that are so-edited.

[0400] Moving to testing of cells at 28 days after inception of the cell production process, FIGS. 74A-74B show data for the indicated CD70 CAR-expressing NK cells against 786-O cells at 1:4 or 1:8 E:T ratios. As with day 21 cells, the highly effective nature of the NK cells at 1:4 tend to mask some of the positive CISH-editing effects, though construct 77.71 and internal control NK71 showed some further enhanced cytotoxicity with CISH editing. The impact of CISH editing was more evident at the 1:8 ratio, which saw more notable reductions in tumor cell growth with the 77.71 and NK71 constructs. At 6 days post-rechallenge, more noticeable positive effects of CISH were detected. Using a 1:4 E:T, all of the constructs tested showed either a stable pattern (77.17) or a further increase in cytotoxicity with CISH editing (77.58, 77.71, and NK71). Likewise a similar pattern was seen at the lower 1:8 E:T ratio, indicative of the enhanced effects imparted by CISH editing.

[0401] FIGS. 74E and 74F show corresponding data prior to rechallenge with ACHN cells. Each of the non-limiting constructs tested showed robust cytotoxicity at 1:4 E:T, though CISH editing did further enhance cytotoxicity in the NK771.71 and NK71 constructs. At 1:8 E:T, the editing of CISH recapitulated the enhanced cytotoxicity in those two constructs, with the other two holding relatively steady. After rechallenge similar patterns were noted. In this non-limiting experiment, CISH editing enhanced the cytotoxicity of two constructs both before and after rechallenge, which is in line with several embodiments disclosed herein. In some embodiments, the combination of CD70 editing and CISH edited, with expression of an anti-CD70 CAR results in significantly enhanced persistence and/or cytotoxicity of the cells so edited and engineered.

[0402] FIGS. 75A and 75B show data related to the Indel (insertions or deletions) frequency as measured in the bulk population that was edited with respect to CISH (75A) or CD70 (75B). These data show that random Indel frequency is low and that editing of CISH results in a much higher detection of Indels in the region of DNA anticipated to be edited based on the complementary guide RNA. With respect to CD70, edits are detected in both the CISH edited and non-CISH edited cell populations, as both are edited with respect to CD70. An uptick in Indel frequency is seen with the additional CISH editing, which, in some embodiments, is related to CISH editing inducing an increased number of CD70 editing events. However, in several embodiments, the impact of CISH editing is not directly impacting CD70 editing events, but rather a result of the double-edited cells being enriched over time after the editing and transduction with the CD70 CAR. In other words, a cell edited for CISH would have increased cytotoxicity (as seen with the data above) and a cell edited for CD70 would be more robustly protected from fratricide due to the CD70 CAR expression. Thus, the double knockout cells are enriched in the population over time as compared to those not edited for CD70, which would be reduced as a result of CD70 CAR-based fratricide. Regardless, in several embodiments, the double editing provide multiple benefits (enhanced viability, persistence and/or cytotoxicity) to the edited and engineered cells.

[0403] Assessing CD70 editing is a relatively straightforward undertaking, as endogenous CD70 is expressed on the surface of NK cells. Thus, flow cytometry or other such can be used to detect degree of successful editing of CD70 in a population of cells. As a mechanism to analyze the impacts of editing for CISH, which is an intracellular protein, a surrogate approach was assessed. FIG. 75C depicts a schematic representation of CISH signaling. Since CISH encoded CIS protein, which acts as a negative regulator of STAT5/JAK signaling, the knockout of CISH would disinhibit this pathway, resulting in an increase in Stat5 phosphorylation, which could then be detected, for example, by Western blotting or intracellular staining followed by flow cytometry. By way of example, FIG. 75D shows a Western blot for phosphorylated Stats5, using protein isolated from cells expressing the NK77.71 CAR construct, edited for CD70, expressing a CD70 CAR and either not edited for CISH, or edited for CISH (denoted by the “CISH” indicator). FIGS. 75E and 75F show two sets of normalized data. 75E shows data normalized to the intensity of the band on the Western that corresponds to the electroporated control signal (EP). 75F shows data normalized to the EP control, but set as a value of 1. With cither analysis, these data show that editing CISH results in an increase in the phosphorylated Stat5. Thus, in several embodiments, edited cells for CISH are further analyzed for the degree of pStat5 present, as a surrogate for direct assessment of CISH on a genomic level.

[0404] It is contemplated that various combinations or subcombinations of the specific features and aspects of the embodiments disclosed above may be made and still fall within one or more of the inventions. Further, the disclosure herein of any particular feature, aspect, method, property, characteristic, quality, attribute, element, or the like in connection with an embodiment can be used in all other embodiments set forth herein. Accordingly, it should be understood that various features and aspects of the disclosed embodiments can be combined with or substituted for one another in order to form varying modes of the disclosed inventions. Thus, it is intended that the scope of the present inventions herein disclosed should not be limited by the particular disclosed embodiments described above. Moreover, while the invention is susceptible to various modifications, and alternative forms, specific examples thereof have been shown in the drawings and are herein described in detail. It should be understood, however, that the invention is not to be limited to the particular forms or methods disclosed, but to the contrary, the invention is to cover all modifications, equivalents, and alternatives falling within the spirit and scope of the various embodiments described and the appended claims. Any methods disclosed herein need not be performed in the order recited. The methods disclosed herein include certain actions taken by a practitioner; however, they can also include any third-party instruction of those actions, either expressly or by implication. In addition, where features or aspects of the disclosure are described in terms of Markush groups, those skilled in the art will recognize that the disclosure is also thereby described in terms of any individual member or subgroup of members of the Markush group.

[0405] The ranges disclosed herein also encompass any and all overlap, sub-ranges, and combinations thereof. Language such as “up to,” “at least,” “greater than,” “less than,” “between,” and the like includes the number recited. Numbers preceded by a term such as “about” or “approximately” include the recited numbers. For example, “about 90%” includes “90%.” In some embodiments, at least 95% sequence identity or homology includes 96%, 97%, 98%, 99%, and 100% sequence identity or homology to the reference sequence. In addition, when a sequence is disclosed as “comprising” a nucleotide or amino acid sequence, such a reference shall also include, unless otherwise indicated, that the sequence “comprises”, “consists of” or “consists essentially of” the recited sequence. Any titles or subheadings used herein are for organization purposes and should not be used to limit the scope of embodiments disclosed herein.

[0406] All references cited herein, including but not limited to published and unpublished applications, patents, and literature references, are incorporated herein by reference in their entirety and are hereby made a part of this specification. To the extent publications and patents or patent applications incorporated by reference contradict the disclosure contained in the specification, the specification is intended to supersede and/or take precedence over any such contradictory material.

### SEQUENCES

[0407] In several embodiments, there are provided amino acid sequences that correspond to any of the nucleic acids disclosed herein (and/or included in the accompanying sequence listing), while accounting for degeneracy of the nucleic acid code. Furthermore, those sequences (whether nucleic acid or amino acid) that vary from those expressly disclosed herein (and/or included in the accompanying sequence listing), but have functional similarity or equivalency are also contemplated within the scope of the present disclosure. The foregoing includes mutants, truncations, substitutions, codon optimization, or other types of modifications.

[0408] In accordance with some embodiments described herein, any of the sequences may be used, or a truncated or mutated form of any of the sequences disclosed herein (and/or included in the accompanying sequence listing) may be used and in any combination.

What is claimed is:

1. A method of treating a CD70-expressing cancer in a subject comprising administering to the subject a population of genetically engineered immune cells expressing an anti-CD70 chimeric antigen receptor (CAR) comprising an anti-CD70 binding domain comprising a heavy chain variable (VH) region and a light chain variable (VL) region; a transmembrane domain; and a cytotoxic signaling complex, wherein:
(a) the VH region comprises a CDR-H1, a CDR-H2, and a CDR-H3 contained within the VH region amino acid sequence set forth in SEQ ID NO:956; and the VL region comprises a CDR-L1, a CDR-L2, and a CDR-L3 contained within the VL region amino acid sequence set forth in SEQ ID NO:1030;
(b) the VH region comprises a CDR-H1, a CDR-H2, and a CDR-H3 contained within the VH region amino acid sequence set forth in SEQ ID NO:905; and the VL region comprises a CDR-L1, a CDR-L2, and a CDR-L3 contained within the VL region amino acid sequence set forth in SEQ ID NO:979;
(c) the VH region comprises a CDR-H1, a CDR-H2, and a CDR-H3 contained within the VH region amino acid sequence set forth in SEQ ID NO:943; and the VL region comprises a CDR-L1, a CDR-L2, and a CDR-L3 contained within the VL region amino acid sequence set forth in SEQ ID NO:1017;
(d) the VH region comprises a CDR-H1, a CDR-H2, and a CDR-H3 contained within the VH region amino acid sequence set forth in SEQ ID NO:899; and the VL region comprises a CDR-L1, a CDR-L2, and a CDR-L3 contained within the VL region amino acid sequence set forth in SEQ ID NO:973;
(e) the VH region comprises a CDR-H1, a CDR-H2, and a CDR-H3 contained within the VH region amino acid sequence set forth in SEQ ID NO:958; and the VL region comprises a CDR-L1, a CDR-L2, and a CDR-L3 contained within the VL region amino acid sequence set forth in SEQ ID NO:1032;
(f) the VH region comprises a CDR-H1, a CDR-H2, and a CDR-H3 contained within the VH region amino acid sequence set forth in SEQ ID NO:904; and the VL region comprises a CDR-L1, a CDR-L2, and a CDR-L3 contained within the VL region amino acid sequence set forth in SEQ ID NO:978;
(g) the VH region comprises a CDR-H1, a CDR-H2, and a CDR-H3 contained within the VH region amino acid sequence set forth in SEQ ID NO:929; and the VL region comprises a CDR-L1, a CDR-L2, and a CDR-L3 contained within the VL region amino acid sequence set forth in SEQ ID NO:1003;
(h) the VH region comprises a CDR-H1, a CDR-H2, and a CDR-H3 contained within the VH region amino acid sequence set forth in SEQ ID NO:916; and the VL region comprises a CDR-L1, a CDR-L2, and a CDR-L3 contained within the VL region amino acid sequence set forth in SEQ ID NO:990;
(i) the VH region comprises a CDR-H1, a CDR-H2, and a CDR-H3 contained within the VH region amino acid sequence set forth in SEQ ID NO:950; and the VL region comprises a CDR-L1, a CDR-L2, and a CDR-L3 contained within the VL region amino acid sequence set forth in SEQ ID NO:1024; or
(j) the VH region comprises a CDR-H1, a CDR-H2, and a CDR-H3 contained within the VH region amino acid sequence set forth in SEQ ID NO:940; and the VL region comprises a CDR-L1, a CDR-L2, and a CDR-L3 contained within the VL region amino acid sequence set forth in SEQ ID NO: 1014.

2. The method of claim 1, wherein:
(a) the VH region comprises an amino acid sequence having at least 90% sequence identity to the amino acid sequence of SEQ ID NO: 956, and the VL region comprises an amino acid sequence having at least 90% sequence identity to the amino acid sequence of SEQ ID NO:1030;
(b) the VH region comprises an amino acid sequence having at least 90% sequence identity to the amino acid sequence of SEQ ID NO:905, and the VL region comprises an amino acid sequence having at least 90% sequence identity to the amino acid sequence of SEQ ID NO:979;
(c) the VH region comprises an amino acid sequence having at least 90% sequence identity to the amino acid sequence of SEQ ID NO:943, and the VL region comprises an amino acid sequence having at least 90% sequence identity to the amino acid sequence of SEQ ID NO:1017;
(d) the VH region comprises an amino acid sequence having at least 90% sequence identity to the amino acid sequence of SEQ ID NO:899, and the VL region comprises an amino acid sequence having at least 90% sequence identity to the amino acid sequence of SEQ ID NO:973;
(e) the VH region comprises an amino acid sequence having at least 90% sequence identity to the amino acid sequence of SEQ ID NO:908, and the VL region comprises an amino acid sequence having at least 90% sequence identity to the amino acid sequence of SEQ ID NO:1032;
(f) the VH region comprises an amino acid sequence having at least 90% sequence identity to the amino acid sequence of SEQ ID NO:904, and the VL region comprises an amino acid sequence having at least 90% sequence identity to the amino acid sequence of SEQ ID NO:978;
(g) the VH region comprises an amino acid sequence having at least 90% sequence identity to the amino acid sequence of SEQ ID NO:929, and the VL region comprises an amino acid sequence having at least 90% sequence identity to the amino acid sequence of SEQ ID NO:1003;
(h) the VH region comprises an amino acid sequence having at least 90% sequence identity to the amino acid sequence of SEQ ID NO:916, and the VL region comprises an amino acid sequence having at least 90% sequence identity to the amino acid sequence of SEQ ID NO:990;
(i) the VH region comprises an amino acid sequence having at least 90% sequence identity to the amino acid sequence of SEQ ID NO:900, and the VL region comprises an amino acid sequence having at least 90% sequence identity to the amino acid sequence of SEQ ID NO: 1024; or
(j) the VH region comprises an amino acid sequence having at least 90% sequence identity to the amino acid sequence of SEQ ID NO:940, and the VL region comprises an amino acid sequence having at least 90% sequence identity to the amino acid sequence of SEQ ID NO: 1014.

3. The method of claim 1, wherein:
(a) the VH region comprises the amino acid sequence of SEQ ID NO:956, and the VL region comprises the amino acid sequence of SEQ ID NO:1030;
(b) the VH region comprises the amino acid sequence of SEQ ID NO:905, and the VL region comprises the amino acid sequence of SEQ ID NO:979;
(c) the VH region comprises the amino acid sequence of SEQ ID NO:943, and the VL region comprises the amino acid sequence of SEQ ID NO: 1017;
(d) the VH region comprises the amino acid sequence of SEQ ID NO:899, and the VL region comprises the amino acid sequence of SEQ ID NO:973;
(e) the VH region comprises the amino acid sequence of SEQ ID NO:958, and the VL region comprises the amino acid sequence of SEQ ID NO: 1032;
(f) the VH region comprises the amino acid sequence of SEQ ID NO:904, and the VL region comprises the amino acid sequence of SEQ ID NO:978;
(g) the VH region comprises the amino acid sequence of SEQ ID NO:929, and the VL region comprises the amino acid sequence of SEQ ID NO:1003;
(h) the VH region comprises the amino acid sequence of SEQ ID NO:916, and the VL region comprises the amino acid sequence of SEQ ID NO:990;
(i) the VH region comprises the amino acid sequence of SEQ ID NO:950, and the VL region comprises the amino acid sequence of SEQ ID NO:1024; or
(j) the VH region comprises the amino acid sequence of SEQ ID NO:940, and the VL region comprises the amino acid sequence of SEQ ID NO:1014.

4. The method of claim 1, wherein the VH region comprises a CDR-H1, a CDR-H2, and a CDR-H3 contained within the VH region amino acid sequence set forth in SEQ ID NO:956; and the VL region comprises a CDR-L1, a CDR-L2, and a CDR-L3 contained within the VL region amino acid sequence set forth in SEQ ID NO:1030.

5. The method of claim 1, wherein the VH region comprises an amino acid sequence having at least 90% sequence identity to the amino acid sequence of SEQ ID NO: 956, and the VL region comprises an amino acid sequence having at least 90% sequence identity to the amino acid sequence of SEQ ID NO:1030.

6. The method of claim 1, wherein, wherein the VH region comprises the amino acid sequence of SEQ ID NO:956, and the VL region comprises the amino acid sequence of SEQ ID NO: 1030.

7. The method of claim 1, wherein the VH region comprises a CDR-H1, a CDR-H2, and a CDR-H3 contained within the VH region amino acid sequence set forth in SEQ ID NO:905; and the VL region comprises a CDR-L1, a CDR-L2, and a CDR-L3 contained within the VL region amino acid sequence set forth in SEQ ID NO:979.

8. The method of claim 1, wherein the VH region comprises an amino acid sequence having at least 90% sequence identity to the amino acid sequence of SEQ ID NO: 905, and the VL region comprises an amino acid sequence having at least 90% sequence identity to the amino acid sequence of SEQ ID NO:979.

9. The method of claim 1, wherein, wherein the VH region comprises the amino acid sequence of SEQ ID NO:905, and the VL region comprises the amino acid sequence of SEQ ID NO: 979.

10. The method of claim 1, wherein anti-CD70 binding is a single-chain variable fragment (scFv).

11. The method of claim 1, wherein the transmembrane domain comprises a CD8alpha transmembrane region.

12. The method of claim 1, wherein the cytotoxic signaling complex comprises an OX-40 subdomain and a CD3zeta subdomain.

13. The method of claim 1, wherein the genetically engineered immune cells express membrane bound interleukin 15 (mbIL15).

14. The method of claim 1, wherein the genetically engineered immune cells are genetically edited to reduce expression of CD70 protein.

15. The method of claim 1, wherein the genetically engineered immune cells are genetically edited to reduce expression of cytokine-inducible SH2-containing (CIS) protein.

16. The method of claim 1, wherein the genetically engineered immune cells are genetically edited to reduce expression of one or more of: a Cbl proto-oncogene B (Cblb) protein, an A2A adenosine receptor, an A2B adenosine receptor, an A3 adenosine receptor, an A1 adenosine receptor, a transforming growth factor beta receptor (TGFBR), beta-2 microglobulin (B2M), CIITA (class II major histocompatibility complex transactivator), Natural Killer Group 2, member A (NKG2A) receptor, tripartite motif-containing protein 29 (TRIM29) protein, and a suppressor of cytokine signaling 2 (SOCS2) protein.

17. The method of claim 1, wherein the population of genetically engineered immune cells comprises natural killer (NK) cells.

18. A method of treating a CD70-expressing cancer in a subject comprising administering to the subject a population of genetically engineered immune cells expressing an anti-CD70 chimeric antigen receptor (CAR), wherein:
(i) the genetically engineered immune cells are genetically edited to reduce expression of CD70 protein;
(ii) the genetically engineered immune cells express membrane-bound interleukin 15 (IL15); and
(iii) the anti-CD70 CAR comprises an anti-CD70 binding domain comprising a heavy chain variable (VH) region and a light chain variable (VL) region; a transmembrane domain; and a cytotoxic signaling complex, wherein:
(a) the VH region comprises a CDR-H1, a CDR-H2, and a CDR-H3 contained within the VH region amino acid sequence set forth in SEQ ID NO:956; and the VL region comprises a CDR-L1, a CDR-L2, and a CDR-L3 contained within the VL region amino acid sequence set forth in SEQ ID NO:1030;
(b) the VH region comprises a CDR-H1, a CDR-H2, and a CDR-H3 contained within the VH region amino acid sequence set forth in SEQ ID NO:905; and the VL region comprises a CDR-L1, a CDR-L2, and a CDR-L3 contained within the VL region amino acid sequence set forth in SEQ ID NO:979;
(c) the VH region comprises a CDR-H1, a CDR-H2, and a CDR-H3 contained within the VH region amino acid sequence set forth in SEQ ID NO:943; and the VL region comprises a CDR-L1, a CDR-L2, and a CDR-L3 contained within the VL region amino acid sequence set forth in SEQ ID NO:1017;
(d) the VH region comprises a CDR-H1, a CDR-H2, and a CDR-H3 contained within the VH region amino acid sequence set forth in SEQ ID NO:899; and the VL region comprises a CDR-L1, a CDR-L2, and a CDR-L3 contained within the VL region amino acid sequence set forth in SEQ ID NO:973;
(e) the VH region comprises a CDR-H1, a CDR-H2, and a CDR-H3 contained within the VH region amino acid sequence set forth in SEQ ID NO:958; and the VL region comprises a CDR-L1, a CDR-L2, and a CDR-L3 contained within the VL region amino acid sequence set forth in SEQ ID NO:1032;
(f) the VH region comprises a CDR-H1, a CDR-H2, and a CDR-H3 contained within the VH region amino acid sequence set forth in SEQ ID NO:904; and the VL region comprises a CDR-L1, a CDR-L2, and a CDR-L3 contained within the VL region amino acid sequence set forth in SEQ ID NO:978;
(g) the VH region comprises a CDR-H1, a CDR-H2, and a CDR-H3 contained within the VH region amino acid sequence set forth in SEQ ID NO:929; and the VL region comprises a CDR-L1, a CDR-L2, and a CDR-L3 contained within the VL region amino acid sequence set forth in SEQ ID NO:1003;
(h) the VH region comprises a CDR-H1, a CDR-H2, and a CDR-H3 contained within the VH region amino acid sequence set forth in SEQ ID NO:916; and the VL region comprises a CDR-L1, a CDR-L2, and a CDR-L3 contained within the VL region amino acid sequence set forth in SEQ ID NO:990;
(i) the VH region comprises a CDR-H1, a CDR-H2, and a CDR-H3 contained within the VH region amino acid sequence set forth in SEQ ID NO:950; and the VL region comprises a CDR-L1, a CDR-L2, and a CDR-L3 contained within the VL region amino acid sequence set forth in SEQ ID NO:1024; or
(j) the VH region comprises a CDR-H1, a CDR-H2, and a CDR-H3 contained within the VH region amino acid sequence set forth in SEQ ID NO:940; and the VL region comprises a CDR-L1, a CDR-L2, and a CDR-L3 contained within the VL region amino acid sequence set forth in SEQ ID NO:1014.

19. The method of claim 18, wherein the VH region comprises a CDR-H1, a CDR-H2, and a CDR-H3 contained within the VH region amino acid sequence set forth in SEQ ID NO:956; and the VL region comprises a CDR-L1, a CDR-L2, and a CDR-L3 contained within the VL region amino acid sequence set forth in SEQ ID NO:1030.

20. The method of claim 18, wherein the VH region comprises a CDR-H1, a CDR-H2, and a CDR-H3 contained within the VH region amino acid sequence set forth in SEQ ID NO:905; and the VL region comprises a CDR-L1, a CDR-L2, and a CDR-L3 contained within the VL region amino acid sequence set forth in SEQ ID NO:979.

21. The method of claim 18, wherein the genetically engineered immune cells are genetically edited to reduce expression of cytokine-inducible SH2-containing (CIS) protein.

22. The method of claim 18, wherein the genetically engineered immune cells are genetically edited to reduce expression of one or more of: a Cbl proto-oncogene B (Cblb) protein, an A2A adenosine receptor, an A2B adenosine receptor, an A3 adenosine receptor, an A1 adenosine receptor, a transforming growth factor beta receptor (TGFBR), beta-2 microglobulin (B2M), CIITA (class II major histocompatibility complex transactivator), Natural Killer Group 2, member A (NKG2A) receptor, tripartite motif-containing protein 29 (TRIM29) protein, and a suppressor of cytokine signaling 2 (SOCS2) protein.

23. The method of claim 18, wherein the cytotoxic signaling complex comprises an OX-40 subdomain and a CD3zeta subdomain.

24. The method of claim 18, wherein the population of genetically engineered immune cells comprises natural killer (NK) cells.

25. A method of treating a CD70-expressing cancer in a subject comprising administering to the subject a population of genetically engineered natural killer (NK) cells expressing an anti-CD70 chimeric antigen receptor (CAR), wherein:
(i) the genetically engineered NK cells express membrane bound IL-15 (mbIL15);
(ii) the genetically engineered NK cells are genetically edited to reduce expression of CD70 protein and cytokine-inducible SH2-containing (CIS) protein; and
(iii) the anti-CD70 CAR comprises an anti-CD70 binding domain comprising a heavy chain variable (VH) region and a light chain variable (VL) region; a transmembrane domain; and a cytotoxic signaling complex, wherein:
(a) the VH region comprises a CDR-H1, a CDR-H2, and a CDR-H3 contained within the VH region amino acid sequence set forth in SEQ ID NO:956; and the VL region comprises a CDR-L1, a CDR-L2, and a CDR-L3 contained within the VL region amino acid sequence set forth in SEQ ID NO:1030;
(b) the VH region comprises a CDR-H1, a CDR-H2, and a CDR-H3 contained within the VH region amino acid sequence set forth in SEQ ID NO:905; and the VL region comprises a CDR-L1, a CDR-L2, and a CDR-L3 contained within the VL region amino acid sequence set forth in SEQ ID NO:979;
(c) the VH region comprises a CDR-H1, a CDR-H2, and a CDR-H3 contained within the VH region amino acid sequence set forth in SEQ ID NO:943; and the VL region comprises a CDR-L1, a CDR-L2, and a CDR-L3 contained within the VL region amino acid sequence set forth in SEQ ID NO:1017;
(d) the VH region comprises a CDR-H1, a CDR-H2, and a CDR-H3 contained within the VH region amino acid sequence set forth in SEQ ID NO:899; and the VL region comprises a CDR-L1, a CDR-L2, and a CDR-L3 contained within the VL region amino acid sequence set forth in SEQ ID NO:973;
(e) the VH region comprises a CDR-H1, a CDR-H2, and a CDR-H3 contained within the VH region amino acid sequence set forth in SEQ ID NO:958; and the VL region comprises a CDR-L1, a CDR-L2, and a CDR-L3 contained within the VL region amino acid sequence set forth in SEQ ID NO:1032;
(f) the VH region comprises a CDR-H1, a CDR-H2, and a CDR-H3 contained within the VH region amino acid sequence set forth in SEQ ID NO:904; and the VL region comprises a CDR-L1, a CDR-L2, and a CDR-L3 contained within the VL region amino acid sequence set forth in SEQ ID NO:978;
(g) the VH region comprises a CDR-H1, a CDR-H2, and a CDR-H3 contained within the VH region amino acid sequence set forth in SEQ ID NO:929; and the VL region comprises a CDR-L1, a CDR-L2, and a CDR-L3 contained within the VL region amino acid sequence set forth in SEQ ID NO:1003;
(h) the VH region comprises a CDR-H1, a CDR-H2, and a CDR-H3 contained within the VH region amino acid sequence set forth in SEQ ID NO:916; and the VL region comprises a CDR-L1, a CDR-L2, and a CDR-L3 contained within the VL region amino acid sequence set forth in SEQ ID NO:990;
(i) the VH region comprises a CDR-H1, a CDR-H2, and a CDR-H3 contained within the VH region amino acid sequence set forth in SEQ ID NO:950; and the VL region comprises a CDR-L1, a CDR-L2, and a CDR-L3 contained within the VL region amino acid sequence set forth in SEQ ID NO:1024; or
(j) the VH region comprises a CDR-H1, a CDR-H2, and a CDR-H3 contained within the VH region amino acid sequence set forth in SEQ ID NO:940; and the VL region comprises a CDR-L1, a CDR-L2, and a CDR-L3 contained within the VL region amino acid sequence set forth in SEQ ID NO:1014.

26. The method of claim 25, wherein the VH region comprises a CDR-H1, a CDR-H2, and a CDR-H3 contained within the VH region amino acid sequence set forth in SEQ ID NO:956; and the VL region comprises a CDR-L1, a CDR-L2, and a CDR-L3 contained within the VL region amino acid sequence set forth in SEQ ID NO:1030.

27. The method of claim 25, wherein the VH region comprises a CDR-H1, a CDR-H2, and a CDR-H3 contained within the VH region amino acid sequence set forth in SEQ ID NO:905; and the VL region comprises a CDR-L1, a CDR-L2, and a CDR-L3 contained within the VL region amino acid sequence set forth in SEQ ID NO:979.

28. The method of claim 25, wherein the genetically engineered NK cells are genetically edited to reduce expression of one or more of: a Cbl proto-oncogene B (Cblb) protein, an A2A adenosine receptor, an A2B adenosine receptor, an A3 adenosine receptor, an A1 adenosine receptor, a transforming growth factor beta receptor (TGFBR), beta-2 microglobulin (B2M), CIITA (class II major histocompatibility complex transactivator), Natural Killer Group 2, member A (NKG2A) receptor, tripartite motif-containing protein 29 (TRIM29) protein, and a suppressor of cytokine signaling 2 (SOCS2) protein.

29. The method of claim 25, wherein the cytotoxic signaling complex comprises an OX-40 subdomain and a CD3zeta subdomain.

The application's sequence listing, which the Patent Office published only in electronic form, follows.

SEQUENCE LISTING (1214 sequences)

SEQ ID NO: 1 - DNA, 135 bp, Homo sapiens
  misc_feature 1..135: note = CD8alpha hinge - DNA
  source 1..135: mol_type = other DNA
accacgacgccagcgccgcgaccaccaacaccggcgcccaccatcgcgtcgcagcccctgtccctgcgcccagaggcgtgccggccagcggcggggggcgcagtgcacacgagggggctggacttcgcctgtgat

SEQ ID NO: 2 - protein, 45 aa, Homo sapiens
  REGION 1..45: note = MISC_FEATURE - CD8a hinge - protein
TTTPAPRPPTPAPTIASQPLSLRPEACRPAAGGAVHTRGLDFACD

SEQ ID NO: 3 - DNA, 63 bp, Homo sapiens
  misc_feature 1..63: note = CD8 TM - DNA
  source 1..63: mol_type = other DNA
atctacatctgggcgcccttggccgggacttgtggggtccttctcctgtcactggttatcacc

SEQ ID NO: 4 - protein, 21 aa, Homo sapiens
  REGION 1..21: note = MISC_FEATURE - CD8 TM - protein
IYIWAPLAGTCGVLLLSLVIT

SEQ ID NO: 5 - DNA, 111 bp, Homo sapiens
  misc_feature 1..111: note = OX40 - DNA
  source 1..111: mol_type = other DNA
cggagggaccagaggctgccccccgatgcccacaagccccctgggggaggcagtttccggacccccatccaagaggagcaggccgacgcccactccaccctggccaagatc

SEQ ID NO: 6 - protein, 37 aa, Homo sapiens
  REGION 1..37: note = MISC_FEATURE - OX40 - protein
RRDQRLPPDAHKPPGGGSFRTPIQEEQADAHSTLAKI

SEQ ID NO: 7 - DNA, 336 bp, Homo sapiens
  misc_feature 1..336: note = CD3zeta - DNA
  source 1..336: mol_type = other DNA
agagtgaagttcagcaggagcgcagacgcccccgcgtaccagcagggccagaaccagctctataacgagctcaatctaggacgaagagaggagtacgatgttttggacaagagacgtggccgggaccctgagatggggggaaagccgagaaggaagaaccctcaggaaggcctgtacaatgaactgcagaaagataagatggcggaggcctacagtgagattgggatgaaaggcgagcgccggaggggcaaggggcacgatggcctttaccagggtctcagtacagccaccaaggacacctacgacgcccttcacatgcaggccctgccccctcgc

SEQ ID NO: 8 - protein, 112 aa, Homo sapiens
  REGION 1..112: note = MISC_FEATURE - CD3zeta - protein
RVKFSRSADAPAYQQGQNQLYNELNLGRREEYDVLDKRRGRDPEMGGKPRRKNPQEGLYNELQKDKMAEAYSEIGMKGERRRGKGHDGLYQGLSTATKDTYDALHMQALPPR

SEQ ID NO: 9 - DNA, 63 bp, Homo sapiens
  misc_feature 1..63: note = T2A - DNA
  source 1..63: mol_type = other DNA
ggctctggcgagggaaggggttccctgcttacttgcggcgacgtcgaagagaatcccggtccg

SEQ ID NO: 10 - protein, 21 aa, Homo sapiens
  REGION 1..21: note = MISC_FEATURE - T2A - protein
GSGEGRGSLLTCGDVEENPGP

SEQ ID NO: 11 - DNA, 342 bp, Homo sapiens
  misc_feature 1..342: note = Homo sapiens native IL15 - DNA
  source 1..342: mol_type = other DNA
aactgggtcaacgtgattagcgatttgaagaaaatcgaggaccttatacagtctatgcatattgacgctacactgtatactgagagtgatgtacacccgtcctgtaaggtaacggccatgaaatgctttcttctggagctccaggtcatcagcttggagtctggggacgcaagcatccacgatacggttgaaaacctcatcatccttgcgaacaactctctctcatctaatggaaacgttacagagagtgggtgtaaggagtgcgaagagttggaagaaaaaaacatcaaagaatttcttcaatccttcgttcacatagtgcaaatgttcattaacacgtcc

SEQ ID NO: 12 - protein, 114 aa, Homo sapiens
  REGION 1..114: note = MISC_FEATURE - Homo sapiens native IL15 - protein
NWVNVISDLKKIEDLIQSMHIDATLYTESDVHPSCKVTAMKCFLLELQVISLESGDASIHDTVENLIILANNSLSSNGNVTESGCKECEELEEKNIKEFLQSFVHIVQMFINTS

SEQ ID NO: 13 - DNA, 207 bp, Homo sapiens
  misc_feature 1..207: note = CD8hinge/TM - DNA
  source 1..207: mol_type = other DNA
actaccacacccgccccgaggccacctacgccggcaccgactatcgccagtcaacccctctctctgcgccccgaggcttgccggcctgcggctggtggggcggtccacacccggggcctggattttgcgtgcgatatatacatctgggcacctcttgccggcacctgcggagtgctgcttctctcactcgttattacgctgtactgc

SEQ ID NO: 14 - protein, 66 aa, Homo sapiens
  REGION 1..66: note = MISC_FEATURE - CD8hinge/TM - protein
TTTPAPRPPTPAPTIASQPLSLRPEACRPAAGGAVHTRGLDFACDIYIWAPLAGTCGVLLLSLVIT

SEQ ID NO: 15 - DNA, 30 bp, Homo sapiens
  misc_feature 1..30: note = Linker 1 (used after FLAG tag)- DNA
  source 1..30: mol_type = other DNA
ggcggtggtggctctggtggtggcggcagc

SEQ ID NO: 16 - protein, 10 aa, Homo sapiens
  REGION 1..10: note = MISC_FEATURE - Linker 1 (used after FLAG tag)- protein
GGGGSGGGGS

SEQ ID NO: 17 - DNA, 30 bp, Homo sapiens
  misc_feature 1..30: note = Linker 2 - after neg. control binding domain - DNA
  source 1..30: mol_type = other DNA
ggccaggccggctccggaggaggaggatcc

SEQ ID NO: 18 - protein, 10 aa, Homo sapiens
  REGION 1..10: note = MISC_FEATURE - Linker 2 - after neg. control binding domain - Protein
GQAGSGGGGS

SEQ ID NO: 19 - DNA, 12 bp, Homo sapiens
  misc_feature 1..12: note = Linker post scFv - DNA
  source 1..12: mol_type = other DNA
ggccaggccggc

SEQ ID NO: 20 - protein, 4 aa, Homo sapiens
  REGION 1..4: note = MISC_FEATURE - Linker post scFv - protein
GQAG

SEQ ID NO: 21 - DNA, 33 bp, Homo sapiens
  misc_feature 1..33: note = Misc Linker - DNA
  source 1..33: mol_type = other DNA
ggcggcggcggtagcggtggtggcggctccgga

SEQ ID NO: 22 - protein, 11 aa, Homo sapiens
  REGION 1..11: note = MISC_FEATURE - Misc Linker - protein
GGGGSGGGGSG

SEQ ID NO: 23 - DNA, 18 bp, Homo sapiens
  misc_feature 1..18: note = Linker - DNA
  source 1..18: mol_type = other DNA
ggccaggccggctccgga

SEQ ID NO: 24 - protein, 6 aa, Homo sapiens
  REGION 1..6: note = MISC_FEATURE - Linker - protein
GQAGSG

SEQ ID NO: 25 - DNA, 405 bp, Homo sapiens
  misc_feature 1..405: note = NKG2D Extracellular Fragment - DNA
  source 1..405: mol_type = other DNA
ttattcaaccaagaagttcaaattcccttgaccgaaagttactgtggcccatgtcctaaaaactggatatgttacaaaaataactgctaccaattttttgatgagagtaaaaactggtatgagagccaggcttcttgtatgtctcaaaatgccagccttctgaaagtatacagcaaagaggaccaggatttacttaaactggtgaagtcatatcattggatgggactagtacacattccaacaaatggatcttggcagtgggaagatggctccattctctcacccaacctactaacaataattgaaatgcagaagggagactgtgcactctatgcctcgagctttaaaggctatatagaaaactgttcaactccaaatacgtacatctgcatgcaaaggactgtg

SEQ ID NO: 26 - protein, 135 aa, Homo sapiens
  REGION 1..135: note = MISC_FEATURE - NKG2D Extracellular Fragment - protein
LFNQEVQIPLTESYCGPCPKNWICYKNNCYQFFDESKNWYESQASCMSQNASLLKVYSKEDQDLLKLVKSYHWMGLVHIPTNGSWQWEDGSILSPNLLTIIEMQKGDCALYASSFKGYIENCSTPNTYICMQRTV

SEQ ID NO: 27 - DNA, 645 bp, Homo sapiens
  misc_feature 1..645: note = Full Human NKG2D - DNA
  source 1..645: mol_type = other DNA
gggtggattcgtggtcggaggtctcgacacagctgggagatgagtgaatttcataattataacttggatctgaagaagagtgatttttcaacacgatggcaaaagcaaagatgtccagtagtcaaaagcaaatgtagagaaaatgcatctccattttttttctgctgcttcatcgctgtagccatgggaatccgtttcattattatggtaacaatatggagtgctgtattcctaaactcattattcaaccaagaagttcaaattcccttgaccgaaagttactgtggcccatgtcctaaaaactggatatgttacaaaaataactgctaccaattttttgatgagagtaaaaactggtatgagagccaggcttcttgtatgtctcaaaatgccagccttctgaaagtatacagcaaagaggaccaggatttacttaaactggtgaagtcatatcattggatgggactagtacacattccaacaaatggatcttggcagtgggaagatggctccattctctcacccaacctactaacaataattgaaatgcagaagggagactgtgcactctatgcctcgagctttaaaggctatatagaaaactgttcaactccaaatacgtacatctgcatgcaaaggactgtg

SEQ ID NO: 28 - DNA, 405 bp, Homo sapiens
  misc_feature 1..405: note = Codon optimized human NKG2D fragment - DNA
  source 1..405: mol_type = other DNA
ctgttcaatcaggaagtccagatccccctgacagagtcttactgcggcccatgtcccaagaactggatctgctacaagaacaattgttatcagttctttgacgagagcaagaactggtatgagtcccaggcctcttgcatgagccagaatgcctctctgctgaaggtgtacagcaaggaggaccaggatctgctgaagctggtgaagtcctatcactggatgggcctggtgcacatccctacaaacggctcttggcagtgggaggacggctccatcctgtctccaaatctgctgaccatcatcgagatgcagaagggcgattgcgccctgtacgccagctccttcaagggctatatcgagaactgctccacacccaatacctacatctgtatgcagaggaccgtg

SEQ ID NO: 29 - DNA, 126 bp, Homo sapiens
  misc_feature 1..126: note = 4-1BB
  source 1..126: mol_type = other DNA
aaacggggcagaaagaaactcctgtatatattcaaacaaccatttatgagaccagtacaaactactcaagaggaagatggctgtagctgccgatttccagaagaagaagaaggaggatgtgaactg

SEQ ID NO: 30 - protein, 29 aa, Homo sapiens
  REGION 1..29: note = MISC_FEATURE - Amino Acid Sequence CD28 Transmembrane domain
FWVLVVVGGVLACYSLLVTVAFIIFWVRS

SEQ ID NO: 31 - protein, 39 aa, Homo sapiens
  REGION 1..39: note = MISC_FEATURE - Amino Acid Sequence CD28 IC domain
KRSRLLHSDYMNMTPRRPGPTRKHYQPYAPPRDFAAYRS

SEQ ID NO: 32 - DNA, 1122 bp, synthetic construct
  misc_feature 1..1122: note = NKG2D-Ox40-CD3z (without mbIL15)
  source 1..1122: mol_type = other DNA
atggccttaccagtgaccgccttgctcctgccgctggccttgctgctccacgccgccaggccgttattcaaccaagaagttcaaattcccttgaccgaaagttactgtggcccatgtcctaaaaactggatatgttacaaaaataactgctaccaattttttgatgagagtaaaaactggtatgagagccaggcttcttgtatgtctcaaaatgccagccttctgaaagtatacagcaaagaggaccaggatttacttaaactggtgaagtcatatcattggatgggactagtacacattccaacaaatggatcttggcagtgggaagatggctccattctctcacccaacctactaacaataattgaaatgcagaagggagactgtgcactctatgcctcgagctttaaaggctatatagaaaactgttcaactccaaatacgtacatctgcatgcaaaggactgtgaccacgacgccagcgccgcgaccaccaacaccggcgcccaccatcgcgtcgcagcccctgtccctgcgcccagaggcgtgccggccagcggcggggggcgcagtgcacacgagggggctggacttcgcctgtgatatctacatctgggcgcccttggccgggacttgtggggtccttctcctgtcactggttatcaccctttactgccggagggaccagaggctgccccccgatgcccacaagccccctgggggaggcagtttccggacccccatccaagaggagcaggccgacgcccactccaccctggccaagatcagagtgaagttcagcaggagcgcagacgcccccgcgtaccagcagggccagaaccagctctataacgagctcaatctaggacgaagagaggagtacgatgttttggacaagagacgtggccgggaccctgagatggggggaaagccgagaaggaagaaccctcaggaaggcctgtacaatgaactgcagaaagataagatggcggaggcctacagtgagattgggatgaaaggcgagcgccggaggggcaaggggcacgatggcctttaccagggtctcagtacagccaccaaggacacctacgacgcccttcacatgcaggccctgccccctcgc

SEQ ID NO: 33 - protein, 374 aa, synthetic construct
  REGION 1..374: note = NKG2D-CD8a hinge/tm-OX40-CD3z (NKX101)
MALPVTALLLPLALLLHAARPLFNQEVQIPLTESYCGPCPKNWICYKNNCYQFFDESKNWYESQASCMSQNASLLKVYSKEDQDLLKLVKSYHWMGLVHIPTNGSWQWEDGSILSPNLLTIIEMQKGDCALYASSFKGYIENCSTPNTYICMQRTVTTTPAPRPPTPAPTIASQPLSLRPEACRPAAGGAVHTRGLDFACDIYIWAPLAGTCGVLLLSLVITLYCRRDQRLPPDAHKPPGGGSFRTPIQEEQADAHSTLAKIRVKFSRSADAPAYQQGQNQLYNELNLGRREEYDVLDKRRGRDPEMGGKPRRKNPQEGLYNELQKDKMAEAYSEIGMKGERRRGKGHDGLYQGLSTATKDTYDALHMQALPPR

SEQ ID NO: 34 - DNA, 2150 bp, synthetic construct
  misc_feature 1..2150: note = NK19H-NF-2 -NKX019 (includes T2A and mbIL15)
  source 1..2150: mol_type = other DNA
gaattcgccgccaccatggccttaccagtgaccgccttgctcctgccgctggccttgctgctccacgccgccaggccggatattcagatgacccagagcccgagcagcctgagcgcgagcgtgggcgatcgcgtgaccattacctgccgcgcgagccaggatattagcaaatatctgaactggtatcagcagaaaccgggcggcaccgtgaaactgctgatttatcataccagccgcctgcatagcggcgtgccgagccgctttagcggcagcggcagcggcaccgattttaccctgaccattagcagcctgcagccggaagatattgcgacctatttttgccagcagggcaacaccctgccgtatacctttggcggcggcaccaaactggaaattaccggtggcggtggctcgggcggtggtgggtcgggtggcggcggatctcaggtgcagctgcaggaaagcggcccgggcctggtgaaaccgagccagaccctgagcctgacctgcaccgtgagcggcgtgagcctgccggattatggcgtgagctggattcgccagccgccgggcaaaggcctggaatggattggcgtgatttggggcagcgaaaccacctattataacagcgcgctgaaaagccgcctgaccattagcaaagataacagcaaaaaccaggtgagcctgaaactgagcagcgtgaccgcggcggataccgcggtgtattattgcgcgaaacattattattatggcggcagctatgcgatggattattggggccagggcaccagcgtgaccgtgagcagcaccacgacgccagcgccgcgaccaccaacaccggcgcccaccatcgcgtcgcagcccctgtccctgcgcccagaggcgtgccggccagcggcggggggcgcagtgcacacgagggggctggacttcgcctgtgatatctacatctgggcgcccttggccgggacttgtggggtccttctcctgtcactggttatcaccctttactgccggagggaccagaggctgccccccgatgcccacaagccccctgggggaggcagtttccggacccccatccaagaggagcaggccgacgcccactccaccctggccaagatcagagtgaagttcagcaggagcgcagacgcccccgcgtaccagcagggccagaaccagctctataacgagctcaatctaggacgaagagaggagtacgatgttttggacaagagacgtggccgggaccctgagatggggggaaagccgagaaggaagaaccctcaggaaggcctgtacaatgaactgcagaaagataagatggcggaggcctacagtgagattgggatgaaaggcgagcgccggaggggcaaggggcacgatggcctttaccagggtctcagtacagccaccaaggacacctacgacgcccttcacatgcaggccctgccccctcgcggctctggcgagggaaggggttccctgcttacttgcggcgacgtcgaagagaatcccggtccgatggccctcccagtaactgccctccttttgcccctcgcactccttcttcatgccgctcgccccaactgggtcaacgtgattagcgatttgaagaaaatcgaggaccttatacagtctatgcatattgacgctacactgtatactgagagtgatgtacacccgtcctgtaaggtaacggccatgaaatgctttcttctggagctccaggtcatcagcttggagtctggggacgcaagcatccacgatacggttgaaaacctcatcatccttgcgaacaactctctctcatctaatggaaacgttacagagagtgggtgtaaggagtgcgaagagttggaagaaaaaaacatcaaagaatttcttcaatccttcgttcacatagtgcaaatgttcattaacacgtccactaccacacccgccccgaggccacctacgccggcaccgactatcgccagtcaacccctctctctgcgccccgaggcttgccggcctgcggctggtggggcggtccacacccggggcctggattttgcgtgcgatatatacatctgggcacctcttgccggcacctgcggagtgctgcttctctcactcgttattacgctgtactgctaagcggccgcgtcgac

SEQ ID NO: 35 - protein, 706 aa, synthetic construct
  REGION 1..706: note = NK19H-NF-2
MALPVTALLLPLALLLHAARPDIQMTQSPSSLSASVGDRVTITCRASQDISKYLNWYQQKPGGTVKLLIYHTSRLHSGVPSRFSGSGSGTDFTLTISSLQPEDIATYFCQQGNTLPYTFGGGTKLEITGGGGSGGGGSGGGGSQVQLQESGPGLVKPSQTLSLTCTVSGVSLPDYGVSWIRQPPGKGLEWIGVIWGSETTYYNSALKSRLTISKDNSKNQVSLKLSSVTAADTAVYYCAKHYYYGGSYAMDYWGQGTSVTVSSTTTPAPRPPTPAPTIASQPLSLRPEACRPAAGGAVHTRGLDFACDIYIWAPLAGTCGVLLLSLVITLYCRRDQRLPPDAHKPPGGGSFRTPIQEEQADAHSTLAKIRVKFSRSADAPAYQQGQNQLYNELNLGRREEYDVLDKRRGRDPEMGGKPRRKNPQEGLYNELQKDKMAEAYSEIGMKGERRRGKGHDGLYQGLSTATKDTYDALHMQALPPRGSGEGRGSLLTCGDVEENPGPMALPVTALLLPLALLLHAARPNWVNVISDLKKIEDLIQSMHIDATLYTESDVHPSCKVTAMKCFLLELQVISLESGDASIHDTVENLIILANNSLSSNGNVTESGCKECEELEEKNIKEFLQSFVHIVQMFINTSTTTPAPRPPTPAPTIASQPLSLRPEACRPAAGGAVHTRGLDFACDIYIWAPLAGTCGVLLLSLVITLYC

SEQ ID NO: 36 - DNA, 735 bp, synthetic construct
  misc_feature 1..735: note = NK71 anti-CD70 scFv
  source 1..735: mol_type = other DNA
caggtcaccttgaaggagtctggtcctgtgctggtgaaacccacagagaccctcacgctgacctgcaccgtctctgggttctcactcagtaatgctagaatgggtgtgacctggatccgtcagcccccagggaaggccctggagtggcttgcacacattttttcgaatgacgaaaaatcctacagtacatctctgaagagcaggctcaccatctccaaggacacttccaaaacccaggtggtccttaccatgaccaacatggaccctgtggacacagccacatattactgtgcacggatacgagattactatgacattagtagttattatgactactggggccagggaaccctggtcagcgtctcctcaggcggtggtggctctggtggtggcggcagcggcggtggtggctctgacatccagatgacccagtctccatctgccatgtctgcatctgtaggagacagagtcaccatcacttgtcgggcgagtcaggacattagcaattatttagcctggtttcagcagaaaccagggaaagtccctaagcgcctgatctatgctgcatccagtttgcaaagtggggtcccatcaaggttcagcggcagtggatcggggacagagttcactctcacaatcagcagcctgctgcctgaagattttgcaacttattactgtctacagcttaatagtttcccgttcacttttggcggagggaccaaggtggagatcaac

SEQ ID NO: 37 - DNA, 750 bp, synthetic construct
  misc_feature 1..750: note = NK72 anti-CD70 scFv
  source 1..750: mol_type = other DNA
gaagtgcagcttgtccagagcggagccgaagtgaagaagcctggcgagagcctgaagatcagctgcaagggctcaggttacggattcacaagttattggataggttgggtgcgccagatgcctggtaagggactggaatggatgggtatcattcatcccgatgatagcgacaccaaatacagcccaagctttcagggccaggtcacaatcagcgctgacaagagcatcagcaccgcctaccttcagtggtcgtctctgaaggccagcgacaccgcaatgtactactgtgcctctagctatttgcgtggcttgtggggaggctattttgactattggggccaaggtacactggtcaccgtcagcagcggcggtggtggctctggtggtggcggcagcggcggtggtggctctgagctccagagcgtgctgacccagcctcctagcgcaagcggcacccctggacagcgtgtgacaattagctgtagcggatcaagctcaaacattggctcaaattatgtgaattggtatcagcaattgcccggtacagcacccaaactgctcatttatggagattatcaacgacctagcggagtgcctgatcgttttagcggtagcaaaagcggcaccagcgcatcactggcaatttcaggcctgcgtagcgaagatgaggcggattattactgtgctacccgcgacgattcgttatctgggtctgtcgtttttggcaccggtacaaaactgaccgtgctg

SEQ ID NO: 38 - DNA, 720 bp, synthetic construct
  misc_feature 1..720: note = NK77.1_CD70_DB01_C03 scFv
  source 1..720: mol_type = other DNA
caggtgcagctggtgcagtctggggctgaggtgaagaagcctggggcctcagtgaaggtctcctgcaaggcttctggatacaccttcaccggccattatttgcactgggtgcgacaggcccctggacaagggcttgagtggatgggatggatcaaccctaacagtggtggcacaaactatgcacagaagtttcagggcagggtcaccatgaccagggacacgtccactagcacagtgtacatggagctgagcagcctgagatctgaggacacggccgtgtattactgtgttagaggaagcggttggtatgacctggactactggggccaagggaccctggtcaccgtctcctcaggtggaggcggttcaggcggaggtggctctggcggtggcggatcggacatccagatgacccagtctccatcctccctgtctgcatctgtaggagacagagtcaccatcacttgccgggcaagtcagaatattggcacatatttagcttggtatcagcagaaaccagggaaagcccctaagctcctgatctatgacgcatccaacttggagactggggtcccatcaaggttcagtggcagtggatctgggacagatttcactctcaccatcagcagtctgcaacctgaagattttgcaacttactactgtcaacagagttacagaatccctctcaccttcggccaagggacacgactggagattaaa

SEQ ID NO: 39 - DNA, 723 bp, synthetic construct
  misc_feature 1..723: note = NK77.2_CD70_DB01_D02 scFv
  source 1..723: mol_type = other DNA
caggtgcagctggtgcagtctggggctgaggtgaagaagcctggggcctcagtgaaggtttcctgcaaggcatctggatacaccttcaccaactactatatgcactgggtgcgacaggcccctggacaagggcttgagtggatgggaataatcaaccctagtggtgggagcacaagctacgcacagaagttccagggcagagtcaccatgaccagggacacgtccacgagcacagtctacatggagctgagcagcctgagatctgaggacacggccgtgtattactgtgctagagaactaggagtcgccgggtacttcgatctctggggccgtggcaccctggtcactgtctcctcaggtggaggcggttcaggcggaggtggctctggcggtggcggatcggacatccagatgacccagtctccatcctccctgtctgcatctgtaggagacagagtcaccatcacttgccgggcgagtcagaggattagcaattggttagcctggtatcagcagaaaccagggaaagcccctaagctcctgatctatgatgcatccaacttggaaaccggggtcccatccaggttcagtggcagtggatctgggacggattttactctcaccatcagcagcctgcagcctgaagattttgcaacttattactgtcaacagacctatagtcctccccctacttttggccaggggaccaagctggagatcaaa

SEQ ID NO: 40 - DNA, 750 bp, synthetic construct
  misc_feature 1..750: note = NK77.3_CD70_DB01_E06 scFv
  source 1..750: mol_type = other DNA
caggtgcagctggtgcagtctggggctgaggtgaagaagcctggggcctcagtgaaggtttcctgcaaggcatctggatacaccttcaccggttactatatccactgggtgcgacaggcccctggacaagggcttgagtggatgggaataatcaaccctagtggtggaagcacaagctacgcacagaagttccagggcagagtcaccatgaccagggacacgtccacgagcacagtctacatggagctgagcagcctgagatctgaggacacggccgtgtattactgtgctagagacctgtcagggatcgacggatatattggtttctttgactactggggccaagggaccctggtcaccgtctcctcaggtggaggcggttcaggcggaggtggctctggcggtggcggatcggatattgtgatgactcagtctccactctccctgcccgtcacccctggagagccggcctccatctcctgcaggtctagtcagagcctcctgcactctaacggatacaactatttggattggtacctgcagaagccagggcagtctccacagctcctgatctatgcagcctcttcattacaatccggggtccctgacaggttcagtggcagtggatcaggcacagattttacactgaaaatcagcagagtggaggctgaggatgttggggtttattactgcatgcaagctctacaaactcctatcaccttcggccaagggacacgactggagattaaa

SEQ ID NO: 41 - DNA, 723 bp, synthetic construct
  misc_feature 1..723: note = NK77.4_CD70_DB01_G04 scFv
  source 1..723: mol_type = other DNA
caggtgcagctggtgcagtctggggctgaggtgaagaagcctggggcctcagtgaaggtttcctgcaaggcatctggaggaaccttcagaagccatgtcatatcctgggtgcgacaggcccctggacaagggcttgagtggatgggaataatcgatcctagtggtggcagcacaagctacgcacagaggttccagggcagagtcaccatgaccagggacacgtccacgagcacagtctacatggagctgagcagcctgagatctgaggacacggccgtgtattactgtgctaaagattacactgggctgcttggaatggatgtctggggccaagggacaaccgtcaccgtctcttcaggtggaggcggttcaggcggaggtggctctggcggtggcggatcggacatccagatgacccagtctccatcctccctgtctgcatctgtaggagacagagtcaccatcacttgccgggcaagtcaggacattgacacctatttagcctggtatcagcagaaaccagggaaagcccctaagctcctgatctatgctgcatccagtttgcaaagtggggtcccatcaaggttcagtggcagtggatctgggacagatttcactctcaccatcagcagtctgcaacctgaagattttgcaacttactactgtcaacagagttacacaacccctttcacgttcggccaagggaccaaggtggaaatcaaa

SEQ ID NO: 42 - DNA, 723 bp, synthetic construct
  misc_feature 1..723: note = NK77.5_CD70_DB01_G05 scFv
  source 1..723: mol_type = other DNA
caggtgcagctggtgcagtctggggctgaggtgaagaagcctggggcctcagtgaaggtctcctgcaaggcttctggatacaccttcatcgactattatatccattgggtgcgacaggcccctggacaagggcttgagtggatgggatggatgaaccccaacagtggtaacacaggctatgcacagaagttccagggcagagtcaccatgaccagggacacctccacaagcacagtctacatggagctgagcagcctgagatctgaggacacggccgtgtattactgtgcgagaggcctttccggctacgacttggacgactactggggccaagggaccctggtcaccgtctcctcaggtggaggcggttcaggcggaggtggctctggcggtggcggatcggacatccagatgacccagtctccatcctccctgtctgcatctgtaggagacagagtcaccatcacttgccaggcaagtcaggacattagcaactatttaaattggtatcagcagaaaccagggaaagcccctaagctcctgatctatgatgcatccagtttggaaagtggggtcccatcaaggttcagtggcagtggatctgggacagatttcactctcaccatcagcagtctgcaacctgaagattttgcaacttactactgtcaacagagttaccgatcacctctcactttcggcggagggaccaaggtggagatcaaa

SEQ ID NO: 43 - DNA, 720 bp, synthetic construct
  misc_feature 1..720: note = NK77.6_CD70_DB01_G07 scFv
  source 1..720: mol_type = other DNA
caggtgcagctggtgcagtctggggctgaggtgaagaagcctggggcctcagtgaaggtttcctgcaaggcatctggatacaccttcaccagctactatatgcactgggtgcgacaggcccctggacaagggcttgagtggatgggatggatcaacccgaacagtggtggcacaaaatacgcacataagttccagggcagagtcaccatgaccagggacacgtccacgagcacagtctacatggagctgagcagcctgagatctgaggacacggccgtgtattactgtgctagaggactgtcaggttacgattttgactactggggccaagggaccacagtcaccgtctcctcaggtggaggcggttcaggcggaggtggctctggcggtggcggatcggacatccagatgacccagtctccatcctccctgtctgcatctgtaggagacagagtcaccatcacttgccaggcgagtcaggacattagcaactatttaaattggtatcagcagaaaccagggaaagcccctaagctcctgatctacgatgcatccaatttggaaacaggggtcccatcaaggttcagtggaagtggatctgggacagattttactttgaccatcagcagcctgcagcctgaagattttgcaacatattactgtcaacaggcttataggtggcctatcaccttcggccaagggacacgactggagattaaa

SEQ ID NO: 44 - DNA, 723 bp, synthetic construct
  misc_feature 1..723: note = NK77.7_CD70_DB01_G11 scFv
  source 1..723: mol_type = other DNA
caggtgcagctggtgcagtctggggctgaggtgaagaagcctggggcctcagtgaaggtttcctgcaaggcatctggatacaccttcaccggctactatatgcactgggtgcgacaggcccctggacaagggcttgagtggatgggatggatgaaccctaatagtggtaacacaggctacgcacagaagttccagggcagagtcaccatgaccagggacacgtccacgagcacagtctacatggagctgagcagcctgagatctgaggacacggccgtgtattactgtgctagagggaccgacgtgtatggagactttgactactggggccaagggaccctggtcaccgtctcctcaggtggaggcggttcaggcggaggtggctctggcggtggcggatcggacatccagatgacccagtctccatcctccctgtctgcatctgtaggagacagagtcaccatcacttgccgggcaagtcagagcattagcagctatttaaattggtatcagcagaaaccagggaaagcccctaagctcctgatctatgatgcatcctacttggaaacaggggtcccatcaaggttcagtggcagtggatctgggacagatttcactctcaccatcagcagtctgcaacctgaagattttgcaacttactactgtcaacagagttacacaattcctcctacgttcggccaagggaccaaggtggaaatcaaa

SEQ ID NO: 45 - DNA, 744 bp, synthetic construct
  misc_feature 1..744: note = NK77.9_CD70_DB02_A03 scFv
  source 1..744: mol_type = other DNA
caggtgcagctggtgcagtctggggctgaggtgaagaagcctgggtcctcggtgaaggtctcctgcaaggcttctggatacaccttcacagagaacgaaatgcattgggtgcgacaggcccctggacaagggcttgagtggatgggaggcatcatccctatctttggtacagcaaactacgcacagaagttccagggcagagtcacgattaccgcggacgaatccacgagcacagcctacatggagctgagcagcctgagatctgaggacacggccgtgtattactgtgcgagagagggaggaaccgccatggccaccggttattactactatgggatggacgtgtggggccaagggaccaccgtcaccgtctcctcaggtggaggcggttcaggcggaggtggctctggcggtggcggatcggacatccagatgacccagtctccatcctccctgtctgcatctgtaggagacagagtcaccatcacttgccaggcgagtcaggacattagcaactatttaaattggtatcagcagaaaccagggaaagcccctaagctcctgatctacgatgcatccaatttggaaacaggggtcccatcaaggttcagtggaagtggatctgggacagattttactctcaccatcagcagcctgcagcctgaagattttgcaacatattactgtcaacagagctattccacccctctcactttcggccaggggaccaaggtggagatcaaa

SEQ ID NO: 46 - DNA, 738 bp, synthetic construct
  misc_feature 1..738: note = NK77.10_CD70_DB02_A04 scFv
  source 1..738: mol_type = other DNA
caggtgcagctggtgcagtctggggctgaggtgaagaagcctggggcctcagtgaaggtttcctgcaaggcatctggatacaccttcaccgagaatgaaatgcactgggtgcgacaggcccctggacaagggcttgagtggatgggatggatcaactctaatggtggctacacagggtacgcactgaagttccagggcagagtcaccatgaccagggacacgtccacgagcacagtctacatggagctgagcagcctgagatctgaggacacggccgtgtattactgtgctagagccagtaattacggaggacactttgactactggggccaagggaccctggtcaccgtctcctcaggtggaggcggttcaggcggaggtggctctggcggtggcggatcggatattgtgatgactcagtctccactctccctgcccgtcacccctggagagccggcctccatctcctgcaggtctagtcagagcctcctgcattccaacggatacaactatttggattggtacctgcagaagccagggcagtctccacagctcctgatctatcaggcatctagcctggagtccggggtccctgacaggttcagtggcagtggatcaggcacagattttacactgaaaatcagcagagtggaggctgaggatgttggggtttattactgcatgcaaggaacgcactggcctccaactttcggcggagggaccaaggtggagatcaaa

SEQ ID NO: 47 - DNA, 723 bp, synthetic construct
  misc_feature 1..723: note = NK77.11_CD70_DB02_A05 scFv
  source 1..723: mol_type = other DNA
caggtgcagctggtgcagtctggggctgaggtgaagaagcctggggcctcagtgaaggtttcctgcaaggcatctggatacaccttcaccagctactatatgcactgggtgcgacaggcccctggacaagggcttgagtggatgggaataatcaaccctagtggtggcagcacaatatacgcacagaagttccagggcagagtcaccatgaccagggacacgtccacgagcacagtctacatggagctgagcagcctgagatctgaggacacggccgtgtattactgtgctaaagacatgggagcgtgggcagctggttttgactactggggccaagggaccctggtcaccgtctcctcaggtggaggcggttcaggcggaggtggctctggcggtggcggatcggacatccagatgacccagtctccatcctccctgtctgcatctgtaggagacagagtcaccatcacttgccaagcaagtcaggacattagcaactatttaaattggtatcagcagaaaccagggaaagcccctaagctcctgatctatgctacctccaccttggctaacggggtcccatcaaggttcagtggcagtggatctgggacagatttcactctcaccatcagcagtctgcaacctgaagattttgcaacttactactgtcaacagagttacagtacgcttaccttcggccaagggacacgactggagattaaa

SEQ ID NO: 48 - DNA, 726 bp, synthetic construct
  misc_feature 1..726: note = NK77.12_CD70_DB02_A06 scFv
  source 1..726: mol_type = other DNA
caggtgcagctggtgcagtctggggctgaggtgaagaagcctggggcctcagtgaaggtttcctgcaaggcatctggatacaccttcaccgggtactatatgcactgggtgcgacaggcccctggacaagggcttgagtggatgggatggatcaacccaaatagtggtgatacagggtacgcacagaagttccagggcagagtcaccatgaccagggacacgtccacgagcacagtctacatggagctgagcagcctgagatctgaggacacggccgtgtattactgtgctagatccgtcaacgactacggtgattacgacggttactggggccaagggaccctggtcaccgtctcctcaggtggaggcggttcaggcggaggtggctctggcggtggcggatcggacatccagatgacccagtctccatcctccctgtctgcatctgtaggagacagagtcaccatcacttgccaggcgagtcaggacattagcaactatttaaattggtatcagcagaaaccagggaaagcccctaagctcctgatctacgatgcatccaatttggaaacaggggtcccatcaaggttcagtggaagtggatctgggacagattttactctgaccatcagcagcctgcagcctgaagattttgcaacatattactgtcaacagtcttacagtacgcctcctacgttcggccaagggaccaaggtggaaatcaaa

SEQ ID NO: 49 - DNA, 726 bp, synthetic construct
  misc_feature 1..726: note = NK77.13_CD70_DB02_A07 scFv
  source 1..726: mol_type = other DNA
caggtgcagctggtgcagtctggggctgaggtgaagaagcctggggcctcagtgaaggtttcctgcaaggcatctggatacaccttcaccggatactatatgcactgggtgcgacaggcccctggacaagggcttgagtggatgggaataatcaaccctagtggtgggagcacaagctacgcacagaagttccagggcagagtcaccatgaccagggacacgtccacgagcacagtctacatggagctgagcagcctgagatctgaggacacggccgtgtattactgtgctagagattacggtgattatgacgcctcgtttgactactggggccaagggaccctggtcaccgtctcctcaggtggaggcggttcaggcggaggtggctctggcggtggcggatcggacatccagatgacccagtctccatcctccctgtctgcatctgtaggagacagagtcaccatcacttgccgggcaagtcagagcattgacaattggttagcgtggtatcagcagaaaccagggaaagcccctaagctcctgatctatgctgcatccacattgcaaagtggggtcccatcaaggttcagtggcagtggatctgggacagatttcactctcaccatcagcagtctgcaacctgaagattttgcaacttactactgtcaacagagttacgatagtcctcccacttttggccaggggaccaagctggagatcaaa

SEQ ID NO: 50 - DNA, 717 bp, synthetic construct
  misc_feature 1..717: note = NK77.14_CD70_DB02_A08 scFv
  source 1..717: mol_type = other DNA
caggtgcagctggtgcagtctggggctgaggtgaagaagcctggggcctcagtgaaggtttcctgcaaggcatctggatacaccttcaccagctacgatatcaattgggtgcgacaggcccctggacaagggcttgagtggatgggaataatcaacccctccgatggtagcacaatctacgcacagaacttccagggcagagtcaccatgaccagggacacgtccacgagcacagtctacatggagctgagcagcctgagatctgaggacacggccgtgtattactgtgtgaaggaagaggcctggtacttcgatctctggggccgtggcaccctggtcactgtctcctcaggtggaggcggttcaggcggaggtggctctggcggtggcggatcggacatccagatgacccagtctccatcctccctgtctgcatctgtaggagacagagtcaccatcacttgccaggcgagtcaggacattagcaactatttaaattggtatcagcagaaaccagggaaagcccctaagctcctgatctacgatgcatccaatttggaaacaggggtcccatcaaggttcagtggaagtggatctgggacagattttactttgaccatcagcagcctgcagcctgaagattttgcaacatattactgtcaacagtcctatagcacccctctcactttcggcggagggaccaaggtggagatcaaa

SEQ ID NO: 51 - DNA, 717 bp, synthetic construct
  misc_feature 1..717: note = NK77.15_CD70_DB02_A09 scFv
  source 1..717: mol_type = other DNA
caggtgcagctggtgcagtctggggctgaggtgaagaagcctggggcctcagtgaaggtttcctgcaaggcatctggatacaccttcaccagctactatatgcactgggtgcgacaggcccctggacaagggcttgagtggatgggatggatgaaccctgataacggtgatacagggtacgcacagatgttccagggcagagtcaccatgaccagggacacgtccacgagcacagtctacatggagctgagcagcctgagatctgaggacacggccgtgtattactgtgcttcaggggattactatgacatcttgtactggggccaagggaccctggtcaccgtctcctcaggtggaggcggttcaggcggaggtggctctggcggtggcggatcggacatccagatgacccagtctccatcctccctgtctgcatctgtaggagacagagtcaccatcacttgccaggcgagtcaggacattagcaactatttaaattggtatcagcagaaaccagggaaagcccctaagctcctgatctacgatgtgtccaatttggaaacaggggtcccatcaaggttcagtggaagtggatctgggacagattttactctcaccatcagcagcctgcagcctgaagattttgcaacatattactgtcaacaggctaattccttccctctcactttcggcggagggaccaaggtggagatcaaa

SEQ ID NO: 52 - DNA, 720 bp, synthetic construct
  misc_feature 1..720: note = NK77.16_CD70_DB02_A11 scFv
  source 1..720: mol_type = other DNA
caggtgcagctggtgcagtctggggctgaggtgaagaagcctggggcctcagtgaaggtttcctgcaaggcatctggatacaccttcaccagctactatatgcactgggtgcgacaggcccctggacaagggcttgagtggatgggatggatgaaccccaacagtggtgatacaggatacgcacagaagttccagggcagagtcaccatgaccagggacacgtccacgagcacagtctacatggagctgagcagcctgagatctgaggacacggccgtgtattactgtgctagagggcccagcgggtacgaatttgactactggggccaagggaccctggtcaccgtctcctcaggtggaggcggttcaggcggaggtggctctggcggtggcggatcggacatccagatgacccagtctccatcctccctgtctgcatctgtaggagacagagtcaccatcacttgccgggcaagtcagaccattagcaattatttaaattggtatcagcagaaaccagggaaagcccctaagctcctgatctatgacgcatccagtttggaaagtggggtcccatcaaggttcagtggcagtggatctgggacagatttcactctcaccatcagcagtctgcaacctgaagattttgcaacttactactgtcaacaggcaatcagttttcctctcactttcggcggagggaccaaggtggagatcaaa

SEQ ID NO: 53 - DNA, 732 bp, synthetic construct
  misc_feature 1..732: note = NK77.17_CD70_DB02_B06 scFv
  source 1..732: mol_type = other DNA
caggtgcagctggtgcagtctggggctgaggtgaagaagcctggggcctcagtgaaggtttcctgcaaggcatctggatacaccttcaccgattactatatgcactgggtgcgacaggcccctggacaagggcttgagtggatgggaataatcaaccctaatagtggtggaacaaattacgcacagaagttccagggcagagtcaccatgaccagggacacgtccacgagcacagtctacatggagctgagcagcctgagatctgaggacacggccgtgtattactgtgctagagattttagtgtgtatgctgctgcagatggcatggatgtctggggccaagggacattggtcaccgtctcttcaggtggaggcggttcaggcggaggtggctctggcggtggcggatcggacatccagatgacccagtctccatcctccctgtctgcatctgtaggagacagagtcaccatcacttgccgggcaagtcagagcattagcagctatttaaattggtatcagcagaaaccagggaaagcccctaagctcctgatctatgacgcatccaatttggccaccggggtcccatcaaggttcagtggcagtggatctgggacagatttcactctcaccatcagcagtctgcaacctgaagattttgcaacttactactgtcaacagagtgatagttcacctctcactttcggccaagggaccaaggtggagatcaaa

SEQ ID NO: 54 - DNA, 729 bp, synthetic construct
  misc_feature 1..729: note = NK77.18_CD70_DB02_B09 scFv
  source 1..729: mol_type = other DNA
caggtgcagctggtgcagtctggggctgaggtgaagaagcctggggcctcagtgaaggtttcctgcaaggcatctggatacaccttcaccgggtactatatgcactgggtgcgacaggcccctggacaagggcttgagtggatgggaataatcaaccctggggatggcggtacaatctacgcacagaatttccagggcagagtcaccatgaccagggacacgtccacgagcacagtctacatggagctgagcagcctgagatctgaggacacggccgtgtattactgtgctagaggattcggcgagtcagcccccgatgcttttgatatctggggccaagggacaatggtcaccgtctcttcaggtggaggcggttcaggcggaggtggctctggcggtggcggatcggacatccagatgacccagtctccatcctccctgtctgcatctgtaggagacagagtcaccatcacttgccaggcaagtcaggacattagcaattatttaaattggtatcagcagaaaccagggaaagcccctaagctcctgatctatggtgcaacgacattgcaaagtggggtcccatcaaggttcagtggcagtggatctgggacagatttcactctcaccatcagcagtctgcaacctgaagattttgcaacttactactgtcaacaggcggatagttttccttacacttttggccaggggaccaagctggagatcaaa

SEQ ID NO: 55 - DNA, 720 bp, synthetic construct
  misc_feature 1..720: note = NK77.19_CD70_DB02_C03 scFv
  source 1..720: mol_type = other DNA
caggtgcagctggtgcagtctggggctgaggtgaagaagcctggggcctcagtgaaggtttcctgcaaggcatctggatacaccttcaccggttactatatgcactgggtgcgacaggcccctggacaagggcttgagtggatgggaataatcaaccctagtggtgggagcacaagctacgcacagaagttccagggcagagtcaccatgaccagggacacgtccacgagcacagtctacatggagctgagcagcctgagatctgaggacacggccgtgtattactgtgctgccgggacagagatctactacatggacgtctggggcaaagggaccacggtcaccgtctcctcaggtggaggcggttcaggcggaggtggctctggcggtggcggatcggacatccagatgacccagtctccatcctccctgtctgcatctgtaggagacagagtcaccatcacttgcagggcgagtcagactattgacatctatttaaattggtatcagcagaaaccagggaaagcccctaagctcctgatctacgatgcatccaatttggaaacaggggtcccatcaaggttcagtggaagtggatctgggacagattttactttgaccatcagcagcctgcagcctgaagattttgcaacatattactgtcaacaggcagattccttccctctcactttcggcggagggaccaaggtggagatcaaa

SEQ ID NO: 56 - DNA, 747 bp, synthetic construct
  misc_feature 1..747: note = NK77.20_CD70_DB02_C04 scFv
  source 1..747: mol_type = other DNA
caagtgcagttagttcagtcaggcgccgaagttaaaaaacccggagcgagcgtaaaagtgtcttgtaaagccagtggcggcacatttagctcttatgcgatatcatgggttcgccaagcaccaggccagggcctggaatggatggggatgataaatccaagtgatggcgccactacttacgcacagaagttccagggcagagtcaccatgaccagggacacgtccacgagcacagtctacatggagctgagcagcctgagatctgaggacacggccgtgtattactgtgctagagagagggagctactacatttcgccacaaattattactactatggtatggacgtgtggggccaagggaccaccgtcaccgtctcctcaggtggaggcggttcaggcggaggtggctctggcggtggcggatcggacatccagatgacccagtctccatcttctctgtctgcatctgtaggagacagagtcaccatcacttgtcgggcgagtcagggtattagcaacaacttaaattggtatcagcagaaaccagggaaagcccctaagctcctgatctatgctgcatccagtttgcacagtggggtcccatcaaggttcagcggcagtggatctgggacagatttcactctcactatcagcagcctgcagcctgaagattttgcaacttactattgtcaacaggctgatgctttccctctcactttcggcggagggaccaaggtggagatcaaa

SEQ ID NO: 57 - DNA, 735 bp, synthetic construct
  misc_feature 1..735: note = NK77.22_CD70_DB02_C07 scFv
  source 1..735: mol_type = other DNA
caggtgcagctggtgcagtctggggctgaggtgaagaagcctggggcctcagtgaaggtttcctgcaaggcatctggatacaccttcacccggaactatatgcactgggtgcgacaggcccctggacaagggcttgagtggatgggatggatctctcctgacaatggtgttacaaattacgcacagaatttccagggcagagtcaccatgaccagggacacgtccacgagcacagtctacatggagctgagcagcctgagatctgaggacacggccgtgtattactgtgctaagacacaaggctcatccagctggtatcagtggtacttcgatctctggggccgtggcaccctggtcactgtctcctcaggtggaggcggttcaggcggaggtggctctggcggtggcggatcggacatccagatgacccagtctccatcctccctgtctgcatctgtaggagacagagtcaccatcacttgccgggcaagtcagagcattggaacctggttagcctggtatcagcagaaaccagggaaagcccctaagctcctgatctatgctgcatccagtttgcaaagtggggtcccatcaaggttcagtggcagtggatctgggacagatttcactctcaccatcagcagtctgcaacctgaagattttgcaacttactactgtcaacagagttacaccacccctattacgttcggccaagggaccaaggtggaaatcaaa

SEQ ID NO: 58 - DNA, 723 bp, synthetic construct
  misc_feature 1..723: note = NK77.24_CD70_DB02_D02 scFv
  source 1..723: mol_type = other DNA
caggtgcagctggtgcagtctggggctgaggtgaagaagcctggggcctcagtgaaggtttcctgcaaggcatctggatacaccttcaccagctactatatgcactgggtgcgacaggcccctggacaagggcttgagtggatgggaataatcgatccagggagtggtgacacaagctacgcacagaagttccagggcagagtcaccatgaccagggacacgtccacgagcacagtctacatggagctgagcagcctgagatctgaggacacggccgtgtattactgtgctagagggtccaactggtacgactactttgactactggggccaagggaccctggtcaccgtctcctcaggtggaggcggttcaggcggaggtggctctggcggtggcggatcggaaatagtgatgacgcagtctccagccaccctgtctgtgtctccaggggaaagagccaccctctcctgcagggccagtcagagtgttagcagctacttagcctggtaccagcagaaacctggccaggctcccaggctcctcatctatggtgcatccaccagggccactggtatcccagccaggttcagtggcagtgggtctgggacagagttcactctcaccatcagcagcctgcagtctgaagattttgcagtttattactgtcagcagtatgatagctatcctccaactttcggcggagggaccaaggtggagatcaaa

SEQ ID NO: 59 - DNA, 723 bp, synthetic construct
  misc_feature 1..723: note = NK77.25_CD70_DB02_D04 scFv
  source 1..723: mol_type = other DNA
caggtgcagctggtgcagtctggggctgaggtgaagaagcctggggcctcagtgaaggtttcctgcaaggcatctggataccgcctgagcgaccattatatgcactgggtgcgacaggcccctggacaagggcttgagtggatgggaataatcaaccctagtggtgggagcacaacatacgcacagaacttccagggcagagtcaccatgaccagggacacgtccacgagcacagtctacatggagctgagcagcctgagatctgaggacacggccgtgtattactgtgcttccagttactatggtgactacgtcttggtgaattggggccaagggaccctggtcaccgtctcctcaggtggaggcggttcaggcggaggtggctctggcggtggcggatcggacatccagatgacccagtctccatcctccctgtctgcatctgtaggagacagagtcaccatcacttgccaggcaagtcaggacattagcaattatttaaattggtatcagcagaaaccagggaaagcccctaagctcctgatctatgctgcatccaccttggaaagtggggtcccatcaaggttcagtggcagtggatctgggacagatttcactctcaccatcagcagtctgcaacctgaagattttgcaacttactactgtcttcaggattacgactaccctctgacttttggccaggggaccaagctggagatcaaa

SEQ ID NO: 60 - DNA, 726 bp, synthetic construct
  misc_feature 1..726: note = NK77.26_CD70_DB02_D10 scFv
  source 1..726: mol_type = other DNA
caggtgcagctggtgcagtctggggctgaggtgaagaagcctggggcctcagtgaaggtttcctgcaaggcatctggatacaccttcaccgattactatgtccactgggtgcgacaggcccctggacaagggcttgagtggatgggatggatcaacccgaatactggtgggacaagcttcgcacagaatttccagggcagagtcaccatgaccagggacacgtccacgagcacagtctacatggagctgagcagcctgagatctgaggacacggccgtgtattactgtgctagagatctgggtcaatggttgggagagattgactactggggccaagggaccctggtcaccgtctcctcaggtggaggcggttcaggcggaggtggctctggcggtggcggatcggacatccagatgacccagtctccatcttctctctctgcatctgtaggagacagagtcaccatcacttgtcgggcgagtcagacaatttataagtggttagcctggtatcagcagaaaccagggaaagcccctaagctcctgatctatgacgcatccagtttggaaagtggggtcccatcaaggttcagcggcagtggatctgggacagatttcactctcactatcagcagcctgcagcctgaagattttgcaacttactattgtcaacaggctaacagtttccctttcactttcggccctgggaccaaagtggatatcaaa

SEQ ID NO: 61 - DNA, 738 bp, synthetic construct
  misc_feature 1..738: note = NK77.27_CD70_DB02_D11 scFv
  source 1..738: mol_type = other DNA
caggtgcagctggtgcagtctggggctgaggtgaagaagcctggggcctcagtgaaggtttcctgcaaggcatctggatacaccttcaccgactacaccgattactttgtgcactgggtgcgacaggcccctggacaagggcttgagtggatgggaatattcaaccctagtgatggtagcacaagctacgcacaggaattccagggcagagtcaccatgaccagggacacgtccacgagcacagtctacatggagctgagcagcctgagatctgaggacacggccgtgtattactgtgctagaggaccttacagtagtagctggtattactttgactactggggccaagggaccctggtcaccgtctcctcaggtggaggcggttcaggcggaggtggctctggcggtggcggatcggacatccagatgacccagtctccatcctccctgtctgcatctgtaggagacagagtcaccatcacttgccaggcgagtcaggacattagcaactatttaaattggtatcagcagaaaccagggaaagcccctaagctcctgatctacgatgcatccaatttggaaacaggggtcccatcaaggttcagtggaagtggatctgggacagattttactctgaccatcagcagcctgcagcctgaagatttcgcaacatattactgtcaacaggcccactcgtttcctcccacgttcggccaagggaccaaggtggaaatcaaa

SEQ ID NO: 62 - DNA, 726 bp, synthetic construct
  misc_feature 1..726: note = NK77.28_CD70_DB02_E04 scFv
  source 1..726: mol_type = other DNA
caggtgcagctggtgcagtctggggctgaggtgaagaagcctggggcctcagtgaaggtttcctgcaaggcatctggatacatcttcaccgattactatatgcactgggtgcgacaggcccctggacaagggcttgagtggatgggaataatcaaccctagtggtggagatacactttacgcacagaagttccagggcagagtcaccatgaccagggacacgtccacgagcacagtctacatggagctgagcagcctgagatctgaggacacggccgtgtattactgtgctagagaaggcgtaggagctatgggcgtgtttgactactggggccaagggaccctggtcaccgtctcctcaggtggaggcggttcaggcggaggtggctctggcggtggcggatcggacatccagatgacccagtctccatcctccctgtctgcatctgtaggagacagagtcaccatcacttgccgggcaagtaccagcattagcgattatgtgcattggtatcagcagaaaccagggaaagcccctaagctcctgatctatgatgcatccagtttgcaaagtggggtcccatcaaggttcagtggcagtggatctgggacagatttcactctcaccatcagcagtctgcaacctgaagattttgcaacttactactgtcaacagagtgatagtacccctcccactttcggcggagggaccaaggtggagatcaaa

SEQ ID NO: 63 - DNA, 732 bp, synthetic construct
  misc_feature 1..732: note = NK77.29_CD70_DB02_F06 scFv
  source 1..732: mol_type = other DNA
caggtgcagctggtgcagtctggggctgaggtgaagaagcctggggcctcagtgaaggtttcctgcaaggcatctggatacaccttcaccgatcactatatccactgggtgcgacaggcccctggacaagggcttgagtggatgggatggatcagtgcgtacaatggtaaaacaaattacgcacagaagttccagggcagagtcaccatgaccagggacacgtccacgagcacagtctacatggagctgagcagcctgagatctgaggacacggccgtgtattactgtgctagagacacaatctactatgacttttggagtgggtacgactactggggccaagggaccctggtcaccgtctcctcaggtggaggcggttcaggcggaggtggctctggcggtggcggatcggacatccagatgacccagtctccatcctccctgtctgcatctgtaggagacagagtcaccatcacttgccgggcaagtcagggaattagcaataatttaaattggtatcagcagaaaccagggaaagcccctaagctcctgatctattacgcatccaccttgcaaagtggggtcccatcaaggttcagtggcagtggatctgggacagatttcactctcaccatcagcagtctgcaacctgaagattttgcaacttactactgtcaacagagttacagtacccctatcaccttcggccaagggacacgactggagattaaa

SEQ ID NO: 64 - DNA, 732 bp, synthetic construct
  misc_feature 1..732: note = NK77.31_CD70_DB02_F08 scFv
  source 1..732: mol_type = other DNA
caggtgcagctggtgcagtctggggctgaggtgaagaagcctggggcctcagtgaaggtttcctgcaaggcatctggatacaccttcaccagctactatatgcactgggtgcgacaggcccctggacaagggcttgagtggatgggaataatcaaccctagtggtggcgcgacaatctacgcacagaagttccagggcagagtcaccatgaccagggacacgtccacgagcacagtctacatggagctgagcagcctgagatctgaggacacggccgtgtattactgtgctagatctcgcggtgactactatggaagcggggattttgactactggggccaagggaccctggtcaccgtctcctcaggtggaggcggttcaggcggaggtggctctggcggtggcggatcggacatccagatgacccagtctccatcctccctgtctgcatctgtaggagacagagtcaccatcacttgccgggcaagtcagacgattagcaattatttaaattggtatcagcagaaaccagggaaagcccctaagctcctgatctatgatgcatccacgttggaagccggggtcccatcaaggttcagtggcagtggatctgggacagatttcactctcaccatcagcagtctgcaacctgaagattttgcaacttactactgtcaacagagttacaaccctccatacacttttggccaggggaccaagctggagatcaaa

SEQ ID NO: 65 - DNA, 720 bp, synthetic construct
  misc_feature 1..720: note = NK77.32_CD70_DB02_G07 scFv
  source 1..720: mol_type = other DNA
caggtgcagctggtgcagtctggggctgaggtgaagaagcctggggcctcagtgaaggtttcctgcaaggcatctggatacaccttcaccgattactatatgcactgggtgcgacaggcccctggacaagggcttgagtggatgggaataatcaaccctagtggtggaagcacaagctacgcacagaagttccagggcagagtcaccatgaccagggacacgtccacgagcacagtctacatggagctgagcagcctgagatctgaggacacggccgtgtattactgtgctagaggatattttgatcacgcattcgatatctggggccaagggacaatggtcaccgtctcttcaggtggaggcggttcaggcggaggtggctctggcggtggcggatcggacatccagatgacccagtctccatcctccctgtctgcatctgtaggagacagagtcaccatcacttgccgggcaagtcagagcattagcacttatttaaattggtatcagcagaaaccagggaaagcccctaagctcctgatctatgatgcatccaacttggagatcggggtcccatcaaggttcagtggcagtggatctgggacagatttcactctcaccatcagcagtctgcaacctgaagattttgcaacttactactgtcaacagagtgacagttcaccactcactttcggccaggggaccaaggtggagatcaaa

SEQ ID NO: 66 - DNA, 738 bp, synthetic construct
  misc_feature 1..738: note = NK77.33_CD70_DB02_H04 scFv
  source 1..738: mol_type = other DNA
caggtgcagctggtgcagtctggggctgaggtgaagaagcctggggcctcagtgaaggtttcctgcaaggcatctggatacaccttcaccggttactatatgcactgggtgcgacaggcccctggacaagggcttgagtggatgggaataatcaaccctagtggtggggatacaatatacgcacagaagttccagggcagagtcaccatgaccagggacacgtccacgagcacagtctacatggagctgagcagcctgagatctgaggacacggccgtgtattactgtgctagaggtgactcgtcttcatggtacgactattactactacatggacgtctggggcaaagggaccacggtcaccgtctcctcaggtggaggcggttcaggcggaggtggctctggcggtggcggatcggacatccagatgacccagtctccatcctccctgtctgcatctgtaggagacagagtcaccatcacttgccaagcaagtcaggatattagcaactatttaaattggtatcagcagaaaccagggaaagcccctaagctcctgatctatgctgcatccagtttgcaaagtggggtcccatcaaggttcagtggcagtggatctgggacagatttcactctcaccatcagcagtctgcaacctgaagattttgcaacttactactgtcaacagagttaccggacccctctcactttcggcggagggaccaaggtggagatcaaa

SEQ ID NO: 67 - DNA, 723 bp, synthetic construct
  misc_feature 1..723: note = NK77.34_CD70_DB02_H05 scFv
  source 1..723: mol_type = other DNA
caggtgcagctggtgcagtctggggctgaggtgaagaagcctggggcctcagtgaaggtttcctgcaaggcatctggatacaccttcaccgactactttacccactgggtgcgacaggcccctggacaagggcttgagtggatgggatggatcaacacatatgacggtaatacaaattacgcacagaagttccagggcagagtcaccatgaccagggacacgtccacgagcacagtctacatggagctgagcagcctgagatctgaggacacggccgtgtattactgtgctagagaaatggagtggctcggccaggtggactactggggccaagggaccctggtcaccgtctcctcaggtggaggcggttcaggcggaggtggctctggcggtggcggatcggacatccagatgacccagtctccatcctccctgtctgcatctgtaggagacagagtcaccatcacttgccgggcaagtcaggatattcgcaacgatttagggtggtatcagcagaaaccagggaaagcccctaagctcctgatctatgctgcatccaacttggagaccggggtcccatcaaggttcagtggcagtggatctgggacagatttcactctcaccatcagcagtctgcaacctgaagattttgcaacttactactgtcaacagagttacagtgcacctttcactttcggccctgggaccaaagtggatatcaaa

SEQ ID NO: 68 - DNA, 723 bp, synthetic construct
  misc_feature 1..723: note = NK77.35_CD70_DB02_H08 scFv
  source 1..723: mol_type = other DNA
caggtgcagctggtgcagtctggggctgaggtgaagaagcctggggcctcagtgaaggtttcctgcaaggcatctggatacaccttcaccagctactatatacactgggtgcgacaggcccctggacaagggcttgagtggatgggacgaatcaaccctaatggtggagggacaaactacgcacagaagttccagggcagagtcaccatgaccagggacacgtccacgagcacagtctacatggagctgagcagcctgagatctgaggacacggccgtgtattactgtgctagaggccacagagggggtggcgggattgactactggggccaagggaccctggtcaccgtctcctcaggtggaggcggttcaggcggaggtggctctggcggtggcggatcggacatccagatgacccagtctccatcctccctgtctgcatctgtaggagacagagtcaccatcacttgccgggcaagtcaggagattagcaactatttagcctggtatcagcagaaaccagggaaagcccctaagctcctgatctatgatgcatccaacttgcaaactggggtcccatcaaggttcagtggcagtggatctgggacagatttcactctcaccatcagcagtctgcaacctgaagattttgcaacttactactgtcaacagagttacagtacccctttcactttcggccctgggaccaaagtggatatcaaa

SEQ ID NO: 69 - DNA, 723 bp, synthetic construct
  misc_feature 1..723: note = NK77.36_CD70_DB03_A06 scFv
  source 1..723: mol_type = other DNA
caggtgcagctggtgcagtctggggctgaggtgaagaagcctggggcctcagtgaaggtttcctgcaaggcatctggaggtaccttcagtagctacgcaatttcatgggtgcgacaggcccctggacaagggcttgagtggatgggatggatctctcccaacagtggtgacacacactacgcacagaagttccagggcagagtcaccatgaccagggacacgtccacgagcacagtctacatggagctgagcagcctgagatctgaggacacggccgtgtattactgtgctagagactgggggtcaggctggtacgtggactactggggccaagggaccctggtcaccgtctcctcaggtggaggcggttcaggcggaggtggctctggcggtggcggatcggacatccagatgacccagtctccatcctccctgtctgcatctgtaggagacagagtcaccatcacttgccaggcaagtcaggacattagcgattctttaaattggtatcagcagaaaccagggaaagcccctaagctcctgatctattccgcatccagtttgcaaagtggggtcccatcaaggttcagtggcagtggatctgggacagatttcactctcaccatcagcagtctgcaacctgaagattttgcaacttactactgtcaacagagttttacaaccccttatacgttcggccaagggaccaaggtggaaatcaaa

SEQ ID NO: 70 - DNA, 723 bp, synthetic construct
  misc_feature 1..723: note = NK77.37_CD70_DB03_A07 scFv
  source 1..723: mol_type = other DNA
caggtgcagctggtgcagtctggggctgaggtgaagaagcctgggtcctcggtgaaggtctcctgcaaggcttctggaggcaccttcaatagctatggaatcagctgggtgcgacaggcccctggacaagggcttgagtggatgggaggtatcatccctatctttggtacagcaaactacgcacagaagttccagggcagagtcacgattaccgcggacgaatccacgagcacagcctacatggagctgagcagcctgagatctgaggacacggccgtgtattactgtgcgagagatacctacggggatgacgcttttgatatctggggccaagggacaatggtcaccgtctcttcaggtggaggcggttcaggcggaggtggctctggcggtggcggatcggacatccagatgacccagtctccatcttctctgtctgcatctgtaggagacagagtcaccatcacttgtcgggcgagtcagtctattagcagctggttagcctggtatcagcagaaaccagggaaagcccctaagctcctgatctatgatgcatccaatttggaaacaggggtcccatcaaggttcagcggcagtggatctgggacagatttcactctcactatcagcagcctgcagcctgaagattttgcaacttactattgtcaacagaatttcagtcctcctctcaccttcggccaagggacacgactggagattaaa

SEQ ID NO: 71 - DNA, 738 bp, synthetic construct
  misc_feature 1..738: note = NK77.38_CD70_DB03_A08 scFv
  source 1..738: mol_type = other DNA
caggtgcagctggtgcagtctggggctgaggtgaagaagcctggggcctcagtgaaggtttcctgcaaggcatctggatacagtttcaccagctactatatgcactgggtgcgacaggcccctggacaagggcttgagtggatgggaataatcaaccctagtggtgggactacaagctacgcacagaagttccagggcagagtcaccatgaccagggacacgtccacgagcacagtctacatggagctgagcagcctgagatctgaggacacggccgtgtattactgtgctagagacaattccccgtatagctcaagctggtgggactactttgactactggggccaagggaccctggtcaccgtctcctcaggtggaggcggttcaggcggaggtggctctggcggtggcggatcggacatccagatgacccagtctccatcctccctgtctgcatctgtaggagacagagtcaccatcacttgccgggcaagtcaggacattcggcattatttagcatggtatcagcagaaaccagggaaagcccctaagctcctgatctatgacgcatccagtttgcaaagtggggtcccatcaaggttcagtggcagtggatctgggacagatttcactctcaccatcagcagtctgcaacctgaagattttgcaacttactactgtcaacagacctacgacgcacctatcaccttcggccaagggacacgactggagattaaa

SEQ ID NO: 72 - DNA, 732 bp, synthetic construct
  misc_feature 1..732: note = NK77.39_CD70_DB03_A09 scFv
  source 1..732: mol_type = other DNA
caggtgcagctggtgcagtctggggctgaggtgaagaagcctggggcctcagtgaaggtttcctgcaaggcatctggatacaccttcaccgattactatattcactgggtgcgacaggcccctggacaagggcttgagtggatgggatggatcaccccgaacagtggttatacatattacgcacagaatttccagggcagagtcaccatgaccagggacacgtccacgagcacagtctacatggagctgagcagcctgagatctgaggacacggccgtgtattactgtgctagaaacacagactgttatggggacttcctggggctggatgtctggggccaagggacaacggtcaccgtctcttcaggtggaggcggttcaggcggaggtggctctggcggtggcggatcggacatcgtgatgacccagtctccagactccctggctgtgtctctgggcgagagggccaccatcaactgccgggccagctctagtatttccaactacttagcttggtaccagcagaaaccaggacagcctcctaagctgctcatttacggcgcatctacccgggcttccggggtccctgaccgattcagtggcagcgggtctgggacagatttcactctcaccatcagcagcctgcaggctgaagatgtggcagtttattactgtcagcaaagctatagtactcctctcactttcggccaggggaccaaggtggagatcaaa

SEQ ID NO: 73 - DNA, 732 bp, synthetic construct
  misc_feature 1..732: note = NK77.40_CD70_DB03_A11 scFv
  source 1..732: mol_type = other DNA
caggtgcagctggtgcagtctggggctgaggtgaagaagcctggggcctcagtgaaggtttcctgcaaggcatctggatacaccttcaacggctaccttatgcactgggtgcgacaggcccctggacaagggcttgagtggatgggaatagttaacccttccgatggtagcacaggctacgcacagaagttccagggcagagtcaccatgaccagggacacgtccacgagcacagtctacatggagctgagcagcctgagatctgaggacacggccgtgtattactgtgcgaaggacacaggactccgctactttgactggctacttgactactggggccaagggaccctggtcaccgtctcctcaggtggaggcggttcaggcggaggtggctctggcggtggcggatcggacatccagatgacccagtctccatcctccctgtctgcatctgtaggagacagagtcaccatcacttgccgggcgagtcagggcattaccaattttttagcctggtatcagcagaaaccagggaaagcccctaagctcctgatatatgatgcatccaacttggaaaccggggtcccatccaggttcagtggcagtggatctgggacggatttcactctcaccatcagcagcctgcagcctgaagattttgcaacttattactgtcaacagagctatggggcccctcttaccttcggccaagggacacgactggagattaaa

SEQ ID NO: 74 - DNA, 720 bp, synthetic construct
  misc_feature 1..720: note = NK77.41_CD70_DB03_A12 scFv
  source 1..720: mol_type = other DNA
caggtgcagctggtgcagtctggggctgaggtgaagaagcctggggcctcagtgaaggtttcctgcaaggcatctggatacaccttcaccagctactatatgcactgggtgcgacaggcccctggacaagggcttgagtggatgggaataatcgatcctagtggtggccgaacaatttacgcacagcgcttccagggcagagtcaccatgaccagggacacgtccacgagcacagtctacatggagctgagcagcctgagatctgaggacacggccgtgtattactgtgctagacacgaagcaggcggaatctttgactactggggccaagggaccctggtcaccgtctcctcaggtggaggcggttcaggcggaggtggctctggcggtggcggatcggacatccagatgacccagtctccatcctccctgtctgcatctgtaggagacagagtcaccatcacttgccaagcaagtcaggacattagcaactatttaaattggtatcagcagaaaccagggaaagcccctaagctcctgatctattccgcatccaccttgcaaagtggggtcccatcaaggttcagtggcagtggatctgggacagatttcactctcaccatcagcagtctgcaacctgaagattttgcaacttactactgtcaacagagttacagttctccttatagattcggccaagggaccaaggtggaaatcaaa

SEQ ID NO: 75 - DNA, 744 bp, synthetic construct
  misc_feature 1..744: note = NK77.42_CD70_DB03_B01 scFv
  source 1..744: mol_type = other DNA
caggtccagctggtgcagtctggggctgaggtgaagaagcctgggtcctcagtgaaggtctcctgcaaggcttctggatataccttcagcgactcctacatgcattgggtgcgacaggcccctggacaagggcttgagtgggtcggagggatcatccctatggcaggtatacccgcctacgcagaggaattccagggcagagtcacgattaccgcggacgagtccacgagcacagcctacatggagctgagcagcctgagatctgaggacacggccgtgtattactgtgcgagagccgacgattatgggggaaattggtacttcgatctctggggccgtggcaccctggtcactgtctcctcaggtggaggcggttcaggcggaggtggctctggcggtggcggatcggatattgtgatgactcagtctccactctccctgcccgtcacccctggagagccggcctccatctcctgcaggtctagtcagagcctcctccactctaatggctacaactatttggattggtacctgcagaagccagggcagtctccacagctcctgatctatgcagcttctagtctccagtccggggtccctgacaggttcagtggcagtggatcaggcacagattttacactgaaaatcagcagagtggaggctgaggatgttggggtttattactgcatgcaaggggcccattggcctccgacttttggccaggggaccaagctggagatcaaa

SEQ ID NO: 76 - DNA, 726 bp, synthetic construct
  misc_feature 1..726: note = NK77.43_CD70_DB03_B04 scFv
  source 1..726: mol_type = other DNA
caggtgcagctggtgcagtctggggctgaggtgaagaagcctggggcctcagtgaaggtttcctgcaaggcatctggatacatcttcaccgactactatatgcactgggtgcgacaggcccctggacaagggcttgagtggatgggaataatcaaccctagtggtggcagcacaagctacgcacagaagttccagggcagagtcaccatgaccagggacacgtccacgagcacagtctacatggagctgagcagcctgagatctgaggacacggccgtgtattactgtgctagagactcaggatggtatgagtcctggttcgacccctggggccagggaaccctggtcaccgtctcctcaggtggaggcggttcaggcggaggtggctctggcggtggcggatcggacatccagatgacccagtctccatcctccctgtctgcatctgtaggagacagagtcaccatcacttgccgggcaagtcaggacattagggatgggttaggctggtatcagcagaaaccagggaaagcccctaagctcctgatctatgctgcatccactttgcaaagtggggtcccatcaaggttcagtggcagtggatctgggacagatttcactctcaccatcagcagtctgcaacctgaagattttgcaacttactactgtcaacagagttacgggacccctcctacgttcggccaagggaccaaggtggaaatcaaa

SEQ ID NO: 77 - DNA, 729 bp, synthetic construct
  misc_feature 1..729: note = NK77.44_CD70_DB03_B06 scFv
  source 1..729: mol_type = other DNA
caggtgcagctggtgcagtctggggctgaggtgaagaagcctggggcctcagtgaaggtttcctgcaaggcatctggatacaccttcaccgactactatcttcactgggtgcgacaggcccctggacaagggcttgagtggatgggatggatcagcgcctacaatggtaacacaaattacgcacagaagttccagggcagagtcaccatgaccagggacacgtccacgagcacagtctacatggagctgagcagcctgagatctgaggacacggccgtgtattactgtgctagagagattgtgggtgctacagaagattggtacttcgatctctggggccgtggcaccctggtcactgtctcctcaggtggaggcggttcaggcggaggtggctctggcggtggcggatcggaaatagtgatgacgcagtctccagccaccctgtctgtgtctccaggggaaagagccaccctctcctgcagggccagtcagagtgttagcagctatttagcctggtaccagcagaaacctggccaggctcccaggctcctcatctatggtgcatccaccagggccactggtatcccagccaggttcagtggcagtgggtctgggacagagttcactctcaccatcagcagcctgcagtctgaagattttgcagtttattactgtcagcagtatgattcctcccctacgttcggccaagggaccaaggtggaaatcaaa

SEQ ID NO: 78 - DNA, 723 bp, synthetic construct
  misc_feature 1..723: note = NK77.45_CD70_DB03_B09 scFv
  source 1..723: mol_type = other DNA
caggtgcagctggtgcagtctggggctgaggtgaagaagcctggggcctcagtgaaggtttcctgcaaggcatctggatacaccttcaccgcctactatctgcactgggtgcgacaggcccctggacaagggcttgagtggatgggaatgatcaaccccaacaatggtggcacaatttacgcacagacattccagggcagagtcaccatgaccagggacacgtccacgagcacagtctacatggagctgagcagcctgagatctgaggacacggccgtgtattactgtgctagagacctgggcggctacgtcctgtttgactactggggccaagggaccctggtcaccgtctcctcaggtggaggcggttcaggcggaggtggctctggcggtggcggatcggacatccagatgacccagtctccatcctccctgtctgcatctgtaggagacagagtcaccatcacttgccgggcaagtcagagcattagcagctatttaaattggtatcagcagaaaccagggaaagcccctaagctcctgatctatgatgcatccaacttggaaaccggggtcccatcaaggttcagtggcagtggatctgggacagatttcactctcaccatcagcagtctgcaacctgaagattttgcaacttactactgtcaacagagtcacagtgcgcctatcaccttcggccaagggacacgactggagattaaa

SEQ ID NO: 79 - DNA, 723 bp, synthetic construct
  misc_feature 1..723: note = NK77.46_CD70_DB03_C05 scFv
  source 1..723: mol_type = other DNA
caggtgcagctggtgcagtctggggctgaggtgaagaagcctggggcctcagtgaaggtttcctgcaaggcatctggatacaccttcaccgactactatattcactgggtgcgacaggcccctggacaagggcttgagtggatgggaatgatcaaccctagaggaggtagcacaacttacgcacagtcattccagggcagagtcaccatgaccagggacacgtccacgagcacagtctacatggagctgagcagcctgagatctgaggacacggccgtgtattactgtgctagagatttaggtgactatggggactacgactactggggccaagggaccctggtcaccgtctcctcaggtggaggcggttcaggcggaggtggctctggcggtggcggatcggacatccagatgacccagtctccatcctccctgtctgcatctgtaggagacagagtcaccatcacttgccgggcaagtcagagcattagcacaaacttagcttggtatcagcagaaaccagggaaagcccctaagctcctgatctatgatgcatcctatttggaggctggggtcccatcaaggttcagtggcagtggatctgggacagatttcactctcaccatcagcagtctgcaacctgaagattttgcaacttactactgtcaacagagttacagtacccctccgacttttggccaggggaccaagctggagatcaaa

SEQ ID NO: 80 - DNA, 756 bp, synthetic construct
  misc_feature 1..756: note = NK77.47_CD70_DB03_D11 scFv
  source 1..756: mol_type = other DNA
gaggtgcagctgttggagtctgggggaggcttggtacagcctggggggtccctgagactctcctgtgcagcctctggattcacctttagcaattcagatatgaattgggtccgccaggctccagggaaggggctggagtgggtctcagctattagtggtggaggtgacacactctactacgcagactccgtgaagggccggttcaccatctccagagacaattccaagaacacgctgtatctgcaaatgaacagcctgagagccgaggacacggccgtatattactgtgcgatggccagcgctttggacagtagcggtgacaatgaggcttttgatatctggggccaagggacaacagtcaccgtctcttcaggtggaggcggttcaggcggaggtggctctggcggtggcggatcggacatcgtgatgacccagtctccagactccctggctgtgtctctgggcgagagggccaccatcaactgcaagtccagccagagtgttttatattccagtaataacaagaactacttagcttggtaccagcagaaaccaggacagcctcctaagctgctcatttactgggcatctacccgggattccggggtccctgaccgattcagtggcagcgggtctgggacagatttcactctcaccatcagcagcctgcaggctgaagatgtggcagtttattactgtcagcaatattatggcttccctcccaccttcggccaagggacacgactggagattaaa

SEQ ID NO: 81 - DNA, 732 bp, synthetic construct
  misc_feature 1..732: note = NK77.48_CD70_DB03_E01 scFv
  source 1..732: mol_type = other DNA
caggtgcagctggtgcagtctggggctgaggtgaagaagcctggggcctcagtgaaggtttcctgcaaggcatctggatacaccttcaccagctactatatgcactgggtgcgacaggcccctggacaagggcttgagtggatgggatggatcaacccaaataacggtggtacaagctacgcacagaagttccagggcagagtcaccatgaccagggacacgtccacgagcacagtctacatggagctgagcagcctgagatctgaggacacggccgtgtattactgtgctagagtggaggacgatttctggagcggccctagctttgactactggggccaagggaccctggtcaccgtctcctcaggtggaggcggttcaggcggaggtggctctggcggtggcggatcggacatccagatgacccagtctccatcctccctgtctgcatctgtaggagacagagtcaccatcacttgccaagcaagtcacgacattagcaaattcttaaattggtatcagcagaaaccagggaaagcccctaagctcctgatctatgatgcatccaatttgcaacgaggggtcccatcaaggttcagtggcagtggatctgggacagatttcactctcaccatcagcagtctgcaacctgaagattttgcaacttactactgtcaacagacctacagtttccctttcacttttggccaggggaccaagctggagatcaaa

SEQ ID NO: 82 - DNA, 738 bp, synthetic construct
  misc_feature 1..738: note = NK77.49_CD70_DB03_E03 scFv
  source 1..738: mol_type = other DNA
caggtgcagctggtgcagtctggggctgaggtgaagaagcctgggtcctcggtgaaggtctcctgcaaggcttctggaggcaccttcaccaattatgctttcagctgggtgcgacaggcccctggacaagggcttgagtggatgggaggtatcatccctatcagcggtgccgcaaactacgcacagaagttccagggcagagtcacgattaccgcggacgaatccacgagcacagcctacatggagctgagcagcctgagatctgaggacacggccgtgtattactgtgcgagagggtccggactggacgatgcttttgatatctggggccaagggacaatggtcaccgtctcttcaggtggaggcggttcaggcggaggtggctctggcggtggcggatcggatattgtgatgactcagtctccactctccctgcccgtcacccctggagagccggcctccatctcctgcaggtctagtcagagcctcctccattcaaacgggtacaactatttggattggtacctgcagaagccagggcagtctccacagctcctgatctatgatgcctcttcccttcagtccggggtccctgacaggttcagtggcagtggatcaggcacagattttacactgaaaatcagcagagtggaggctgaggatgttggggtttattactgcatgcaagctcggcaaactcctctgaccttcggccaagggacacgactggagattaaa

SEQ ID NO: 83 - DNA, 768 bp, synthetic construct
  misc_feature 1..768: note = NK77.50_CD70_DB03_E09 scFv
  source 1..768: mol_type = other DNA
caggtgcagctggtgcagtctggggctgaggtgaagaagcctggggcctcagtgaaggtttcctgcaaggcatctggatacaccttcaccgcgtactatatgcactgggtgcgacaggcccctggacaagggcttgagtggatgggatggatgaaccccaatagtggtaacacaggatacgcacagaagttccagggcagagtcaccatgaccagggacacgtccacgagcacagtctacatggagctgagcagcctgagatctgaggacacggccgtgtattactgtgctagagagggcagaatcgattacggggactacgacgactactactattactacggtatggacgtgtggggccaagggaccactgtcaccgtctcctcaggtggaggcggttcaggcggaggtggctctggcggtggcggatcggatattgtgatgactcagtctccactctccctgcccgtcacccctggagagccggcctccatctcctgcaggtctagtcagagcctcctgcattcaaatggttacaactatttggattggtacctgcagaagccagggcagtctccacagctcctgatctatgctgcttctaatttacagggtggggtccctgacaggttcagtggcagtggatcaggcacagattttacactgaaaatcagcagagtggaggctgaggatgttggggtttattactgcatgcaaacactagagtcccctgtaactttcggcggagggaccaaggtggagatcaaa

SEQ ID NO: 84 - DNA, 726 bp, synthetic construct
  misc_feature 1..726: note = NK77.51_CD70_DB03_F02 scFv
  source 1..726: mol_type = other DNA
caggtgcagctggtgcagtctggggctgaggtgaagaagcctggggcctcagtgaaggtttcctgcaaggcatctggatacaccttcaccgattactatgtgcactgggtgcgacaggcccctggacaagggcttgagtggatgggaacgatcaaccctagtggtgggagcacaagctacgcacagaagttccagggcagagtcaccatgaccagggacacgtccacgagcacagtctacatggagctgagcagcctgagatctgaggacacggccgtgtattactgtgctagagaccagggactctggttcaccggttttgactactggggccaagggaccctggtcaccgtctcctcaggtggaggcggttcaggcggaggtggctctggcggtggcggatcggacatccagatgacccagtctccatcctccctgtctgcatctgtaggagacagagtcaccatcacttgccgggcaagtcagggcattagcaacaatttaaattggtatcagcagaaaccagggaaagcccctaagctcctgatctatgatgcatccaacttggaacgtggggtcccatcaaggttcagtggcagtggatctgggacagatttcactctcaccatcagcagtctgcaacctgaagattttgcaacttactactgtcaacagagttacgacggtcctatcaccttcggccaagggacacgactggagattaaa

SEQ ID NO: 85 - DNA, 726 bp, synthetic construct
  misc_feature 1..726: note = NK77.52_CD70_DB03_F05 scFv
  source 1..726: mol_type = other DNA
caggtgcagctggtgcagtctggggctgaggtgaagaagcctggggcctcagtgaaggtttcctgcaaggcatctggatacaccttcaccgcctaccacatgcactgggtgcgacaggcccctggacaagggcttgagtggatgggaataatcaaccctggagacggtgccacagggtacgcacagaatctccagggcagagtcaccatgaccagggacacgtccacgagcacagtctacatggagctgagcagcctgagatctgaggacacggccgtgtattactgtgctggtgagggcatttccggatcagatgcttttgatatctggggccaagggacattagtcaccgtctcttcaggtggaggcggttcaggcggaggtggctctggcggtggcggatcggacatccagatgacccagtctccatcctccctgtctgcatctgtaggagacagagtcaccatcacttgccgggcaagtcagagcattagcagctggttagcttggtatcagcagaaaccagggaaagcccctaagctcctgatctatgctgcatccagtttgcaaagtggggtcccatcaaggttcagtggcagtggatctgggacagatttcactctcaccatcagcagtctgcaacctgaagattttgcaacttactactgtttgcaggactacagttatcctctcactttcggcggagggaccaaggtggagatcaaa

SEQ ID NO: 86 - DNA, 720 bp, synthetic construct
  misc_feature 1..720: note = NK77.53_CD70_DB03_F06 scFv
  source 1..720: mol_type = other DNA
caggtgcagctggtgcagtctggggctgaggtgaagaagcctgggtcctcggtgaaggtctcctgcaaggcttctggaggcaccttcagcagctatgctatcagctgggtgcgacaggcccctggacaagggcttgagtggatgggatggatgaatcctaactctggtaacacaggttacgcacagaagttccagggcagagtcacgattaccgcggacgaatccacgagcacagcctacatggagctgagcagcctgagatctgaggacacggccgtgtattactgtgcgtggggagtcgatccgtactactttgactactggggccaagggaccctggtcaccgtctcctcaggtggaggcggttcaggcggaggtggctctggcggtggcggatcggacatccagatgacccagtctccatcctccctgtctgcatctgtaggagacagagtcaccatcacttgccgggcaagtcagagcattaacaggtggttagcgtggtatcagcagaaaccagggaaagcccctaagctcctgatctatgacgcatccaatttggagaccggggtcccatcaaggttcagtggcagtggatctgggacagatttcactctcaccatcagcagtctgcaacctgaagattttgcaacttactactgtcaacagagttacattacccctctcactttcggcggagggaccaaggtggagatcaaa

SEQ ID NO: 87 - DNA, 720 bp, synthetic construct
  misc_feature 1..720: note = NK77.54_CD70_DB03_F09 scFv
  source 1..720: mol_type = other DNA
caggtgcagctggtgcagtctggggctgaggtgaagaagcctggggcctcagtgaaggtttcctgcaaggcatctggatacaccttcaccagctactatatgcactgggtgcgacaggcccctggacaagggcttgagtggatgggaatattcaacccctccgatggtagcacaagctacgcacagaagttccagggcagagtcaccatgaccagggacacgtccacgagcacagtctacatggagctgagcagcctgagatctgaggacacggccgtgtattactgtgctagagatgttggtgagaccacgttcgacccctggggccagggaaccctggtcaccgtctcctcaggtggaggcggttcaggcggaggtggctctggcggtggcggatcggacatccagatgacccagtctccatcctccctgtctgcatctgtaggagacagagtcaccatcacttgccaggcaagtcaggatattagcaactatttaaattggtatcagcagaaaccagggaaagcccctaagctcctgatctatgacgcatccagtttggaaagtggggtcccatcaaggttcagtggcagtggatctgggacagatttcactctcaccatcagcagtctgcaacctgaagattttgcaacttactactgtcaacagactaatagttttcctatcaccttcggccaagggacacgactggagattaaa

SEQ ID NO: 88 - DNA, 735 bp, synthetic construct
  misc_feature 1..735: note = NK77.55_CD70_DB03_F12 scFv
  source 1..735: mol_type = other DNA
caggtgcagctcgttcaaagcggcgccgaggtcaagaaaccaggcgctagcgttaaagttagttgtaaagcctccggctatactttcacatcttacggcatttcttgggtacggcaggcaccggggcagggtttggaatggatggggtggatttccgcctataacggccacacaaattacgcgcagaaattccaggggcgcgttacgatgacacgcgatacctctacctctaccgtttatatggaacttagtagtcttcgttcggaggataccgctgtctactattgcgcacgtgacagtgtacggggttgggactactactacggcatgggggtctggggccaagggaccactgtcaccgtctcctcaggtggaggcggttcaggcggaggtggctctggcggtggcggatcggacatccagatgacccagtctccatcctccctgtctgcatctgtaggagacagagtcaccatcacttgccaggcaagtcaggacattagaaacttcttaaattggtatcagcagaaaccagggaaagcccctaagctcctgatctatgctgcatccacgttgcaaagtggggtcccatcaaggttcagtggcagtggatctgggacagatttcactctcaccatcagcagtctgcaacctgaagattttgcaacttactactgtcaacagagttacagtgcccctagcacttttggccaggggaccaagctggagatcaaa

SEQ ID NO: 89 - DNA, 726 bp, synthetic construct
  misc_feature 1..726: note = NK77.56_CD70_DB03_G06 scFv
  source 1..726: mol_type = other DNA
caggtgcagctggtgcagtctggggctgaggtgaagaagcctgggtcttcagtgaaggtttcctgcaaggcatctggatacaccttcatcgactactatatgcactgggtgcgacaggcccctggacaagggcttgagtggatgggatggatgaaccctcacagtggtaacagtgataatgcaccgaagttccagggcagagtcaccatcaccgcagacgagtccacgagcacagcatacatggagctgagcagcctgagatctgaggacacggccgtgtattactgtgctagaggttactccggatacgatctgacggctgactactggggccaagggaccctggtcaccgtctcctcaggtggaggcggttcaggcggaggtggctctggcggtggcggatcggacatccagatgacccagtctccatcctccctgtctgcatctgtaggagacagagtcaccatcacttgccgggcaagtcagagcattagcaattatttaaattggtatcagcagaaaccagggaaagcccctaagctcctgatctatgacgcatccaacttggagaccggggtcccatcaaggttcagtggcagtggatctgggacagatttcactctcaccatcagcagtctgcaacctgaagattttgcaacttactactgtcaacagagttacagtacccctatcaccttcggccaagggacacgactggagattaaa

SEQ ID NO: 90 - DNA, 753 bp, synthetic construct
  misc_feature 1..753: note = NK77.57_CD70_DB03_G11 scFv
  source 1..753: mol_type = other DNA
caggtgcagctggtgcagtctggggctgaggtgaagaagcctggggcctcagtgaaggtctcctgcaaggcttctggatacaccttcaccggccagtatatgcactgggtgcgacaggcccctggacaagggcttgagtggatgggatggatcaacccgaacactggtgacacaaactatgcacagaagtttcagggcagggtcaccatgaccagggacacgtccaccagcacagtatacatggagctgagcagcctgagatctgaagacacggccgtgtattactgtgcgagagacagcgttttcgaggttgaagggggtactgattattattattactacggtatggatgtctggggccaagggacaatggtcaccgtctcttcaggtggaggcggttcaggcggaggtggctctggcggtggcggatcggacatccagatgacccagtctccatcctccctgtctgcatctgtaggagacagagtcaccatcacttgccgggcaagtgaaaccattagcggctggttagcctggtatcagcagaaaccagggaaagcccctaagctcctgatctatgacgcatccaacttggagactggggtcccatcaaggttcagtggcagtggatctgggacagatttcactctcaccatcagcagtctgcaacctgaagattttgcaacttactactgtcaacagagttacagtaccccttggacgttcggccaagggaccaagctggaaatcaaa

SEQ ID NO: 91 - DNA, 723 bp, synthetic construct
  misc_feature 1..723: note = NK77.58_CD70_DB03_H08 scFv
  source 1..723: mol_type = other DNA
caggtgcagctggtgcagtctggggctgaggtgaagaagcctggggcctcagtgaaggtttcctgcaaggcatctggatacaccttcaccagctacgacattaattgggtgcgacaggcccctggacaagggcttgagtggatgggagtgatcaaccctagtggtggaggtacaagctacgcacagaagttccagggcagagtcaccatgaccagggacacgtccacgagcacagtctacatggagctgagcagcctgagatctgaggacacggccgtgtattactgtgctagatattctggctatgattgggtgtttgactactggggccaagggaccctggtcaccgtctcctcaggtggaggcggttcaggcggaggtggctctggcggtggcggatcggacatccagatgacccagtctccatcctccctgtctgcatctgtaggagacagagtcaccatcacttgccgggcaagtcagggcattggcagctggttagcttggtatcagcagaaaccagggaaagcccctaagctcctgatctatgctgcatccacattgcaaagtggggtcccatcaaggttcagtggcagtggatctgggacagatttcactctcaccatcagcagtctgcaacctgaagattttgcaacttactactgtcaacagagttacagtaccccttggactttcggccctgggaccaaagtggatatcaaa

SEQ ID NO: 92 - DNA, 726 bp, synthetic construct
  misc_feature 1..726: note = NK77.59_CD70_DB03_H10 scFv
  source 1..726: mol_type = other DNA
caggtgcagctggtgcagtctggggctgaggtgaagaagcctggggcctcagtgaaggtttcctgcaaggcatctggatacaccttcgctaactactatatgcactgggtgcgacaggcccctggacaagggcttgagtggatgggaataatcaaccctagtggtggtagcacaagctacgcacagaagttccagggcagagtcaccatgaccagggacacgtccacgagcacagtctacatggagctgagcagcctgagatctgaggacacggccgtgtattactgtgctagagatagcggctcctactttggttggttcgacccctggggccagggaaccctggtcaccgtctcctcaggtggaggcggttcaggcggaggtggctctggcggtggcggatcggacatccagatgacccagtctccatcctccctgtctgcatctgtaggagacagagtcaccatcacttgccgggcaagtcagagcattagcagctctttagcatggtatcagcagaaaccagggaaagcccctaagctcctgatctatgatgcatccagtttgcaaagtggggtcccatcaaggttcagtggcagtggatctgggacagatttcactctcaccatcagcagtctgcaacctgaagattttgcaacttactactgtcaacagagttacaacacccctcccactttcggcggagggaccaagctggagatcaaa

SEQ ID NO: 93 - DNA, 726 bp, synthetic construct
  misc_feature 1..726: note = NK77.60_CD70_DB04_A05 scFv
  source 1..726: mol_type = other DNA
caggtgcagctggtgcagtctggggctgaggtgaagaagcctggggcctcagtgaaggtttcctgcaaggcatctggatacaccttcaccacatactatatgcactgggtgcgacaggcccctggacaagggcttgagtggatgggaataatcaaccctaccggcggtagcacatactacgcacagaagttccagggcagagtcaccatgaccagggacacgtccacgagcacagtctacatggagctgagcagcctgagatctgaggacacggccgtgtattactgtgctagagacagcgggaactatcaagggatctttgactactggggccaagggaccctggtcaccgtctcctcaggtggaggcggttcaggcggaggtggctctggcggtggcggatcggacatccagatgacccagtctccatcctccctgtctgcatctgtaggagacagagtcaccatcacttgccgggcaagtcaggggattggcggctatttagcctggtatcagcagaaaccagggaaagcccctaagctcctgatctatgatgcatccaatttggagaccggggtcccatcaaggttcagtggcagtggatctgggacagatttcactctcaccatcagcagtctgcaacctgaagattttgcaacttactactgtcaacagagttacgactcccctcccaccttcggccaagggacacgactggagattaaa

SEQ ID NO: 94 - DNA, 723 bp, synthetic construct
  misc_feature 1..723: note = NK77.61_CD70_DB04_A07 scFv
  source 1..723: mol_type = other DNA
caggtgcagctggtgcagtctggggctgaggtgaagaagcctggggcctcagtgaaggtttcctgcaaggcatctggaaataccttcaccagctactatatgcactgggtgcgacaggcccctggacaagggcttgagtggatgggatggatcaaccccaacagtggtgacacaaattacgcacagaacttccagggcagagtcaccatgaccagggacacgtccacgagcacagtctacatggagctgagcagcctgagatctgaggacacggccgtgtattactgtgctagaggtgtcagcggttacgatctatttgactactggggccaagggaccctggtcaccgtctcctcaggtggaggcggttcaggcggaggtggctctggcggtggcggatcggacatccagatgacccagtctccatcctccctgtctgcatctgtaggagacagagtcaccatcacttgccgggcaagtcagagcgtgagcagctatttaaattggtatcagcagaaaccagggaaagcccctaagctcctgatctatgatacgtccaacttggagacgggggtcccatcaaggttcagtggcagtggatctgggacagatttcactctcaccatcagcagtctgcaacctgaagattttgcaacttactactgtcaacaggctcatagttttcctctcactttcggcggagggaccaaggtggagatcaaa

SEQ ID NO: 95 - DNA, 723 bp, synthetic construct
  misc_feature 1..723: note = NK77.62_CD70_DB04_A10 scFv
  source 1..723: mol_type = other DNA
gaggtgcagctggtggagtctgggggaggcttggtcaagcctggggggtccctgagactctcctgtgcagcgtctggattcaccttcagtagctatggcatgcactgggtccgccaggctccaggcaaggggctggagtgggtggcatcgataaaacatgatggaagtgagcaatactatgttgactccgtgaagggccgattcaccatctccagagacgattccaagaacacgctgtatctgcaaatgaacagcctgaaaacggaggacacggctgtgtattactgtgcggctagtggagtggatgtctggggccaagggacaaccgtcaccgtctcttcaggtggaggcggttcaggcggaggtggctctggcggtggcggatcggatattgtgatgactcagtctccactctccctgcccgtcacccctggagagccggcctccatctcctgcaggtctagtcagagcctcctgcacagcaatggctacaactatttggattggtacctgcagaagccagggcagtctccacagctcctgatctatttgggttctacccgggcctccggggtccctgacaggttcagtggcagtggatcaggcacagattttacactgaaaatcagcagagtggaggctgaggatgttggggtttattactgcatgcaagctctagatactcctctcactttcggcggagggaccaagttagagatcaaa

SEQ ID NO: 96 - DNA, 732 bp, synthetic construct
  misc_feature 1..732: note = NK77.63_CD70_DB04_A11 scFv
  source 1..732: mol_type = other DNA
caggtgcagctggtgcagtctggggctgaggtgaagaagcctggggcctcagtgaaggtttcctgcaaggcatctggaggtaccttcagtcgttacgacattaattgggtgcgacaggcccctggacaagggcttgagtgggtgggaataatcgatcctacaggtgcgtcaacaagctacgcacagaagttccagggcagagtcaccatgaccagggacacgtccacgagcacagtctacatggagctgagcagcctgagatctgaggacacggccgtgtattactgtgctagagattacagttacgggatggattattatggcatggacgtctggggccaagggaccctggtcaccgtctcctcaggtggaggcggttcaggcggaggtggctctggcggtggcggatcggacatccagatgacccagtctccatcctccctgtctgcatctgtaggagacagagtcaccatcacttgccaggcgagtcaggacattagcaactatttaaattggtatcagcagaaaccagggaaagcccctaagctcctgatctacgatacctccaatttgcagacaggggtcccatcaaggttcagtggaagtggatctgggacagattttactcttaccatcagcagcctgcagcctgaagattttgcaacatattacctgagcacagatctgcagaccaccgctcacttcggccaagggaccaaggtggaaatcaaa

SEQ ID NO: 97 - DNA, 738 bp, synthetic construct
  misc_feature 1..738: note = NK77.64_CD70_DB04_B03 scFv
  source 1..738: mol_type = other DNA
caggtgcagctggtgcagtctggggctgaggtgaagaagcctgggtcctcggtgaaggtctcctgcaaggcttctggatacaccttcaccagctatggaatcagctgggtgcgacaggcccctggacaagggcttgagtggatgggaggtatcatccctatctttggtacaacgaactacgcacagaagttccagggcagagtcacgattaccgcggacgaatccacgagcacagcctacatggagctgagcagcctgagatctgaggacacggccgtgtattactgtgcgagagatcatagcggcgatgggtacttcgatctctggggccgtggcaccctggtcactgtctcctcaggtggaggcggttcaggcggaggtggctctggcggtggcggatcggatattgtgatgactcagtctccactctccctgcccgtcacccctggagagccggcctccatctcctgcaggtctagtcagagcctcctgcactccaacggatacaactatttggattggtacctgcagaagccagggcagtctccacagctcctgatctatgatgcctcttcacttcagtccggggtccctgacaggttcagtggcagtggatcaggcacagattttacactgaaaatcagcagagtggaggctgaggatgttggggtttattactgcatgcaaggaacacactggcctcccacgttcggccaagggaccaaggtggaaatcaaa

SEQ ID NO: 98 - DNA, 720 bp, synthetic construct
  misc_feature 1..720: note = NK77.65_CD70_DB04_B05 scFv
  source 1..720: mol_type = other DNA
caggtgcagctggtgcagtctggggctgaggtgaagaagcctggggcctcagtgaaggtctcctgcaaggcttctggatacaccttcaccgagaatgagatgcactgggtgcgacaggcccctggacaagggcttgagtggatgggatggatcaacccgaacagtggtggcacaaactatgcacagaagtttcagggcagggtcaccatgaccagggacacgtccactagcacagtgtacatggagctgagctctctgagatctgaagacacggccgtgtattactgtgcggggagctggggtggttactactttgactactggggccaagggaccctggtcaccgtctcctcaggtggaggcggttcaggcggaggtggctctggcggtggcggatcggacatccagatgacccagtctccatcctccctgtctgcatctgtaggagacagagtcaccatcacttgccgggcaagtcagagcgttagcagatatttaaattggtatcagcagaaaccagggaaagcccctaagctcctgatctatgatgcatccaatttggaaaccggggtcccatcaaggttcagtggcagtggatctgggacagatttcactctcaccatcagcagtctgcaacctgaagattttgcaacttactactgtcaacaggccgacagtttccctgtgacttttggccaggggaccaagctggagatcaaa

SEQ ID NO: 99 - DNA, 729 bp, synthetic construct
  misc_feature 1..729: note = NK77.66_CD70_DB04_B07 scFv
  source 1..729: mol_type = other DNA
caggtgcagctggtgcagtctggggctgaggtgaagaagcctggggcctcagtgaaggtttcctgcaaggcatctggatacaccttcaccaactactatatctactgggtgcgacaggcccctggacaagggcttgagtggatgggatggatcaaccccaatgacggtgcaacaaattacgcacagaagttccagggcagagtcaccatgaccagggacacgtccacgagcacagtctacatggagctgagcagcctgagatctgaggacacggccgtgtattactgtgctagagaaggcaacgattactattattatttcatggactactggggccaagggaccctggtcaccgtctcctcaggtggaggcggttcaggcggaggtggctctggcggtggcggatcggacatccagatgacccagtctccatcctccctgtctgcatctgtaggagacagagtcaccatcacttgccgggcaagtcagggcattagcaacaatttaaattggtatcagcagaaaccagggaaagcccctaagctcctgatctatcatgcatccaacttggagacgggggtcccatcaaggttcagtggcagtggatctgggacagatttcactctcaccatcagcagtctgcaacctgaagattttgcaacttactactgtcaacagagttacgacggccctatgacttttggccaggggaccaagctggagatcaaa

SEQ ID NO: 100 - DNA, 747 bp, synthetic construct
  misc_feature 1..747: note = NK77.67_CD70_DB04_C01 scFv
  source 1..747: mol_type = other DNA
caggtgcagctggtgcagtctggggctgaggtgaagaagcctgggtcctcggtgaaggtctcctgcaaggcttctggaggcaccttcagcagctatgctatcagctgggtgcgacaggcccctggacaagggcttgagtggatgggaggaatcacaccaatgtttggtacaacggactacgcacagaagttccagggcagagtcacgattaccgcggacgaatccacgagcacagcctacatggagctgagcagcctgagatctgaggacacggccgtgtattactgtgcgagagatgagcgggacggatacgccacagtggcttttgatatctggggccaagggacaatggtcaccgtctcttcaggtggaggcggttcaggcggaggtggctctggcggtggcggatcggatattgtgatgactcagtctccactctccctgcccgtcacccctggagagccggcctccatctcctgcaggtctagtcagagcctcctgcatagcaatggatacaactatttggattggtacctgcagaagccagggcagtctccacagctcctgatctatgatgcttctaatcttgagacaggggtccctgacaggttcagtggcagtggatcaggcacagattttacactgaaaatcagcagagtggaggctgaggatgttggggtttattactgcatgcaagggacgcattggcctcccacgttcggccaagggaccaaggtggaaatcaaa

SEQ ID NO: 101 - DNA, 732 bp, synthetic construct
  misc_feature 1..732: note = NK77.68_CD70_DB04_C04 scFv
  source 1..732: mol_type = other DNA
caggtgcagctggtgcagtctggggctgaggtgaagaagcctggggcctcagtgaaggtttcctgcaaggcatctggatacaccttcaccagctactatatgcactgggtgcgacaggcccctggacaagggcttgagtggatgggaataatcaaccctagtgacggaggaacaagctacgcagacaagttccagggcagagtcaccatgaccagggacacgtccacgagcacagtctacatggagctgagcagcctgagatctgaggacacggccgtgtattactgtgctagagcgcttgcccccctgggatggggtgacggcatggatgtctggggccaagggacaacagtcaccgtctcttcaggtggaggcggttcaggcggaggtggctctggcggtggcggatcggacatccagatgacccagtctccatcctccctgtctgcatctgtaggagacagagtcaccatcacttgccaggcgagtcaggacattagcaactatttaaattggtatcagcagaaaccagggaaagcccctaagctcctgatctacgatgcatccaatttggaaacaggggtcccatcaaggttcagtggaagtggatctgggacagattttactctcaccatcagcagcctgcagcctgaagatttcgcaacatattactgtcaacagtcatatgatggacctatcaccttcggccaagggacacgactggagattaaa

SEQ ID NO: 102 - DNA, 723 bp, synthetic construct
  misc_feature 1..723: note = NK77.69_CD70_DB04_C06 scFv
  source 1..723: mol_type = other DNA
caggtgcagctggtgcagtctggggctgaggtgaagaagcctgggtcctcggtgaaggtctcctgcaaggcttctggatacaccttcactagctattacatccactgggtgcgacaggcccctggacaagggcttgagtggatgggatggatgaatccctcctcaggtgttacgaacttcgcacagaagttccagggcagagtcacgattaccgcggacgaatccacgagcacagcctacatggagctgagcagcctgagatctgaggacacggccgtgtattactgtgcgagaggttcggaccagggtgactggtctgacccctggggccagggaaccctggtcaccgtctcctcaggtggaggcggttcaggcggaggtggctctggcggtggcggatcggacatccagatgacccagtctccatcctccctgtctgcatctgtaggagacagagtcaccatcacttgccgggcaagtcagagcattagcagctatttaaattggtatcagcagaaaccagggaaagcccctaagctcctgatctatgacgcatccaacttggaaacgggggtcccatcaaggttcagtggcagtggatctgggacagatttcactctcaccatcagcagtctgcaacctgaagattttgcaacttactactgtcaacagagttacaatacccctccaactttcggcggagggaccaaggtggagatcaaa

SEQ ID NO: 103 - DNA, 732 bp, synthetic construct
  misc_feature 1..732: note = NK77.70_CD70_DB04_C07 scFv
  source 1..732: mol_type = other DNA
caggtgcagctggtgcagtctggggctgaggtgaagaagcctggggcctcagtgaaggtttcctgcaaggcatctggatacaccttcaccgactcctatatacactgggtgcgacaggcccctggacaagggcttgagtggattggatggatgaaccctaatacaggtgacacaggctacgcacagaagttccagggcagagtcaccatgaccagggacacgtccacgagcacagtctacatggagctgagcagcctgagatctgaggacacggccgtgtattactgtgctaaggacgactttggagagcttgctccagccaccttcgacccctggggccagggaaccctggtcaccgtctcctcaggtggaggcggttcaggcggaggtggctctggcggtggcggatcggacatccagatgacccagtctccatcctccctgtctgcatctgtaggagacagagtcaccatcacttgccaggcaagtcaggacattagcaattatttaaattggtatcagcagaaaccagggaaagcccctaagctcctgatctatggtgcatccagtttgcaaagtggggtcccatcaaggttcagtggcagtggatctgggacagatttcactctcaccatcagcagtctgcaacctgaagattttgcaacttactactgtctgcaggatgcggcgacccctatcaccttcggccaagggacacgactggagattaaa

SEQ ID NO: 104 - DNA, 732 bp, synthetic construct
  misc_feature 1..732: note = NK77.71_CD70_DB04_D02 scFv
  source 1..732: mol_type = other DNA
caggtgcagctggtgcagtctggggctgaggtgaagaagcctggggcctcagtgaaggtttcctgcaaggcatctggatacaccttcaccagctacgacatcaattgggtgcgacaggcccctggacaagggcttgagtggatgggagtcatcagccctagtggtggtggaacaagctacgcacagaagttccagggcagagtcaccatgaccagggacacgtccacgagcacagtctacatggagctgagcagcctgagatctgaggacacggccgtgtattactgtgctagatactacggcggcaaccccgaagggtggtacttcgatctctggggccgtggcaccctggtcactgtctcctcaggtggaggcggttcaggcggaggtggctctggcggtggcggatcggacatccagatgacccagtctccatcctccctgtctgcatctgtaggagacagagtcaccatcacttgccgggcaagtcagagcattggaaattggttagcctggtatcagcagaaaccagggaaagcccctaagctcctgatctatgacgcatccgatttggaaaccggggtcccatcaaggttcagtggcagtggatctgggacagatttcactctcaccatcagcagtctgcaacctgaagattttgcaacttactactgtcaacagagttacactaccccttggacgttcggccaagggaccaaggtggaaatcaaa

SEQ ID NO: 105 - DNA, 777 bp, synthetic construct
  misc_feature 1..777: note = NK77.72_CD70_DB04_D05 scFv
  source 1..777: mol_type = other DNA
gaggtgcagctgctggagtctgggggaggcctcgtccagcctgggggctccctgagactctcctgtgcagcctctggattcgttttcgatgactatgctatccactgggtccgccaggctccgggcaaggggctagagtgggtggcagcgatatcatatgatggaagtaataaatactacgcagactccgtgaagggccgattcaccatctccagagacaattccaagaacacgctgtatctgcaaatgaacagcctgagagctgaggacacggctgtgtattactgtgcgagagctccacaatattatgggagtggcaccgacccacttgaggttagatactactactacggcatggacgtgtggggccaagggaccacggtcaccgtctcctcaggtggaggcggttcaggcggaggtggctctggcggtggcggatcggatattgtgatgactcagtctccactctccctgcccgtcacccctggagagccggcctccatctcctgcaggtctagtcagagcctcttgcattctaatggctacaactatttggattggtacctgcagaagccagggcagtctccacagctcctgatctatgaagtctctaatcgggcctccggggtccctgacaggttcagtggcagtggatcaggcacagattttacactgaaaatcagcagagtggaggctgaggatgttggggtttattactgcatgaaaggcctacaaactcctctgactttcggccctgggaccaaagtggatatcaaa

SEQ ID NO: 106 - DNA, 732 bp, synthetic construct
  misc_feature 1..732: note = NK77.73_CD70_DB04_D07 scFv
  source 1..732: mol_type = other DNA
caggtgcagctggtgcagtctggggctgaggtgaagaagcctgggtcctcggtgaaggtctcctgcaaggcttctggaggcaccttccgcaattatgctatcagctgggtgcgacaggcccctggacaagggcttgagtggatgggaggtatcatccctatctttggtacagcaaactacgcacagaagttccagggcagagtcacgattaccgcggacgaatccacgagcacagcctacatggagctgagcagcctgagatctgaggacacggccgtgtattactgtgcgagagatcacagtgctgggactcaccacgacgcttttgatatctggggccaagggacaatggtcaccgtctcttcaggtggaggcggttcaggcggaggtggctctggcggtggcggatcggacatccagatgacccagtctccatcctccctgtctgcatctgtaggagacagagtcaccatcacttgccgggcaagtcagggcattagcaactatttagcctggtatcagcagaaaccagggaaagcccctaagctcctgatctatgctgcatccagtttgcaaagtggggtcccatcaaggttcagtggcagtggatctgggacagatttcactctcaccatcagcagtctgcaacctgaagattttgcaacttactactgtcaacagagtcacagtacccctctcactttcggccaagggaccaaggtggagatcaaa

SEQ ID NO: 107 - DNA, 717 bp, synthetic construct
  misc_feature 1..717: note = NK77.74_CD70_DB04_D08 scFv
  source 1..717: mol_type = other DNA
caggtgcagctggtgcagtctggggctgaggtgaagaagcctggggcctcagtgaaggtctcctgcaaggcttctggatacaccttcaccagttattatatccactgggtgcgacaggccccgggacaagggcttgagtggatgggatggatgaacccaaacagtggtaacgccggctatgcacagaagttccagggcagagtcaccatgaccagggatacctccacaagcacagtgtacatggagctgagcagcctgagatctgaggacacggccgtgtattactgtgcgagagagtactgggggagctttgactactggggccaagggaccctggtcaccgtctcctcaggtggaggcggttcaggcggaggtggctctggcggtggcggatcggacatccagatgacccagtctccatcctccctgtctgcatctgtaggagacagagtcaccatcacttgccgggcaagtcaggggattagcaataacttaaattggtatcagcagaaaccagggaaagcccctaagctcctgatctatgatgcatccaacttggaaactggggtcccatcaaggttcagtggcagtggatctgggacagatttcactctcaccatcagcagtctgcaacctgaagattttgcaacttactactgtcaacagagttacagtaccccttatacgttcggccaagggaccaaggtggaaatcaaa

SEQ ID NO: 108 - DNA, 720 bp, synthetic construct
  misc_feature 1..720: note = NK77.75_CD70_DB04_D10 scFv
  source 1..720: mol_type = other DNA
caggtgcagctggtgcagtctggggctgaggtgaagaagcctggggcctcagtgaaggtttcctgcaaggcatctggatacaccttcaccggctactatatgcactgggtgcgacaggcccctggacaagggcttgagtggatgggaatgatcgatccaagcgacggtagcacaatttacgcacagaagttccagggcagagtcaccatgaccagggacacgtccacgagcacagtctacatggagctgagcagcctgagatctgaggacacggccgtgtattactgtgctagagagcggccactgtacgcttccgacctgtggggccaagggaccctggtcaccgtctcctcaggtggaggcggttcaggcggaggtggctctggcggtggcggatcggatatccagatgacccagtctccatcctccctgtctgcatctgtaggagacagagtcaccatcacttgccgggcaagtcaggacattggaaatgatttaggctggtatcagcagaaaccagggaaagcccctaagctcctgatctatgctgcatccagtttacaaagtggggtcccatcaaggttcagcggcagtggatctggcacagatttcactctcaccatcagcagcctgcagcctgaagattttgcaacttattactgtctacaagattacgactaccctctcactttcggccaggggaccaaggtggagatcaaa

SEQ ID NO: 109 - DNA, 723 bp, synthetic construct
  misc_feature 1..723: note = NK77.85_CD70_DB03_B02 scFv
  source 1..723: mol_type = other DNA
caggtgcagctggtgcagtctggggctgaggtgaagaagcctgggtcttcagtgaaggtttcctgcaaggcatctggatacaccttcaccaactactatatgcactgggtgcgacaggcccctggacaagggcttgagtggatgggatggatgaaccccgatagtggtaatacagggtacgcacagaagttccagggcagagtcaccatcaccgctgacgaatccacgagcacagcctacatggagctgagcagcctgagatctgaggacacggccgtgtattactgtgctagaagtagcagctcctggcctgacttcgatctctggggccgtggcaccctggtcactgtctcctcaggtggaggcggttcaggcggaggtggctctggcggtggcggatcggacatccagatgacccagtctccatcctccctgtctgcatctgtaggagacagagtcaccatcacttgccgggcaagtcagagcattagcagctatttaaattggtatcagcagaaaccagggaaagcccctaagctcctgatctatgatgcatccaacttggagactggggtcccatcaaggttcagtggcagtggatctgggacagatttcactctcaccatcagcagtctgcaacctgaagattttgcaacttactactgtcaacagagttacaacaccccttacagttttggccaggggaccaaggtggagatcaaa

SEQ ID NO: 110 - DNA, 726 bp, synthetic construct
  misc_feature 1..726: note = NK77.86_CD70_DB04_A06 scFv
  source 1..726: mol_type = other DNA
caggtccaactcgtacaatccggcgcagaagtcaaaaaacccggcgcaagcgtcaaggtatcatgtaaagctagcgggtatacatttacatcctattccatgcattgggtacgccaagctccaggccagggcctggaatgggtcggtatcattaatcccagttccggctctgccagttatgcgcaaaaatttcaaggaagggtgacaatgactcgagataccagtacctccactgtgtatatggaactgtcctcactaaggagcgaagatactgctgtatactactgcgcacgcgaacgtggggcctatagtagtaccttcgactattggggtcagggcacgttagtgacagtgtcttccggtggaggcggttcaggcggaggtggctctggcggtggcggatcggacatccagatgacccagtctccatcctccctgtctgcatctgtaggagacagagtcaccatcacttgccggacaagtcagagcattagcagctatttaaattggtatcagcagaaaccagggaaagcccctaagctcctgatctatgacgcatccaatttggaaaccggggtcccatcaaggttcagtggcagtggatctgggacagatttcactctcaccatcagcagtctgcaacctgaagattttgcaacttactactgtcttcaggactacagttaccctctcactttcggccaagggaccaaggtggagatcaaa

SEQ ID NO: 111 - DNA, 726 bp, synthetic construct
  misc_feature 1..726: note = NK77.87_CD70_DB04_A09 scFv
  source 1..726: mol_type = other DNA
caggtgcagctggtgcagtctggggctgaggtgaagaagcctggggcctcagtgaaggtttcctgcaaggcatctggatacaccttcaccgactactatatgcactgggtgcgacaggcccctggacaagggcttgagtggatgggagtcatcaacccctctgatggtacagctcattacgcacagcggctgcagggcagagtcaccatgaccagggacacgtccacgagcacagtctacatggagctgagcagcctgagatctgaggacacggccgtgtattactgtgctagagacagcggatcttactacgctgactttgactactggggccaagggaccctggtcaccgtctcctcaggtggaggcggttcaggcggaggtggctctggcggtggcggatcggacatccagatgacccagtctccatcctccctgtctgcatctgtaggagacagagtcaccatcacttgccaggcaagtcaggacattagcaattatttaaattggtatcagcagaaaccagggaaagcccctaagctcctgatctatgatgcatccagtttgcaaagtggggtcccatcaaggttcagtggcagtggatctgggacagatttcactctcaccatcagcagtctgcaacctgaagattttgcaacttactactgtcaacagagttacagtacccctcccgccttcggccaagggaccaaggtggaaatcaaa

SEQ ID NO: 112 - DNA, 1521 bp, synthetic construct
  misc_feature 1..1521: note = NK77.76_38-38 scFv
  source 1..1521: mol_type = other DNA
caggtgcagctggtgcagtctggggctgaggtgaagaagcctggggcctcagtgaaggtttcctgcaaggcatctggatacagtttcaccagctactatatgcactgggtgcgacaggcccctggacaagggcttgagtggatgggaataatcaaccctagtggtgggactacaagctacgcacagaagttccagggcagagtcaccatgaccagggacacgtccacgagcacagtctacatggagctgagcagcctgagatctgaggacacggccgtgtattactgtgctagagacaattccccgtatagctcaagctggtgggactactttgactactggggccaagggaccctggtcaccgtctcctcaggtggaggcggttcaggcggaggtggctctggcggtggcggatcggacatccagatgacccagtctccatcctccctgtctgcatctgtaggagacagagtcaccatcacttgccgggcaagtcaggacattcggcattatttagcatggtatcagcagaaaccagggaaagcccctaagctcctgatctatgacgcatccagtttgcaaagtggggtcccatcaaggttcagtggcagtggatctgggacagatttcactctcaccatcagcagtctgcaacctgaagattttgcaacttactactgtcaacagacctacgacgcacctatcaccttcggccaagggacacgactggagattaaaggtggcggtggctcgggcggtggtgggtcgggtggcggcggatctcaggtgcagctggtgcagtctggggctgaggtgaagaagcctggggcctcagtgaaggtttcctgcaaggcatctggatacagtttcaccagctactatatgcactgggtgcgacaggcccctggacaagggcttgagtggatgggaataatcaaccctagtggtgggactacaagctacgcacagaagttccagggcagagtcaccatgaccagggacacgtccacgagcacagtctacatggagctgagcagcctgagatctgaggacacggccgtgtattactgtgctagagacaattccccgtatagctcaagctggtgggactactttgactactggggccaagggaccctggtcaccgtctcctcaggtggaggcggttcaggcggaggtggctctggcggtggcggatcggacatccagatgacccagtctccatcctccctgtctgcatctgtaggagacagagtcaccatcacttgccgggcaagtcaggacattcggcattatttagcatggtatcagcagaaaccagggaaagcccctaagctcctgatctatgacgcatccagtttgcaaagtggggtcccatcaaggttcagtggcagtggatctgggacagatttcactctcaccatcagcagtctgcaacctgaagattttgcaacttactactgtcaacagacctacgacgcacctatcaccttcggccaagggacacgactggagattaaa

SEQ ID NO: 113 - DNA, 1521 bp, synthetic construct
  misc_feature 1..1521: note = NK77.77_64-64 scFv
  source 1..1521: mol_type = other DNA
caggtgcagctggtgcagtctggggctgaggtgaagaagcctgggtcctcggtgaaggtctcctgcaaggcttctggatacaccttcaccagctatggaatcagctgggtgcgacaggcccctggacaagggcttgagtggatgggaggtatcatccctatctttggtacaacgaactacgcacagaagttccagggcagagtcacgattaccgcggacgaatccacgagcacagcctacatggagctgagcagcctgagatctgaggacacggccgtgtattactgtgcgagagatcatagcggcgatgggtacttcgatctctggggccgtggcaccctggtcactgtctcctcaggtggaggcggttcaggcggaggtggctctggcggtggcggatcggatattgtgatgactcagtctccactctccctgcccgtcacccctggagagccggcctccatctcctgcaggtctagtcagagcctcctgcactccaacggatacaactatttggattggtacctgcagaagccagggcagtctccacagctcctgatctatgatgcctcttcacttcagtccggggtccctgacaggttcagtggcagtggatcaggcacagattttacactgaaaatcagcagagtggaggctgaggatgttggggtttattactgcatgcaaggaacacactggcctcccacgttcggccaagggaccaaggtggaaatcaaaggtggcggtggctcgggcggtggtgggtcgggtggcggcggatctcaggtgcagctggtgcagtctggggctgaggtgaagaagcctgggtcctcggtgaaggtctcctgcaaggcttctggatacaccttcaccagctatggaatcagctgggtgcgacaggcccctggacaagggcttgagtggatgggaggtatcatccctatctttggtacaacgaactacgcacagaagttccagggcagagtcacgattaccgcggacgaatccacgagcacagcctacatggagctgagcagcctgagatctgaggacacggccgtgtattactgtgcgagagatcatagcggcgatgggtacttcgatctctggggccgtggcaccctggtcactgtctcctcaggtggaggcggttcaggcggaggtggctctggcggtggcggatcggatattgtgatgactcagtctccactctccctgcccgtcacccctggagagccggcctccatctcctgcaggtctagtcagagcctcctgcactccaacggatacaactatttggattggtacctgcagaagccagggcagtctccacagctcctgatctatgatgcctcttcacttcagtccggggtccctgacaggttcagtggcagtggatcaggcacagattttacactgaaaatcagcagagtggaggctgaggatgttggggtttattactgcatgcaaggaacacactggcctcccacgttcggccaagggaccaaggtggaaatcaaa

SEQ ID NO: 114 - DNA, 1485 bp, synthetic construct
  misc_feature 1..1485: note = NK77.78_65-65 scFv
  source 1..1485: mol_type = other DNA
caggtgcagctggtgcagtctggggctgaggtgaagaagcctggggcctcagtgaaggtctcctgcaaggcttctggatacaccttcaccgagaatgagatgcactgggtgcgacaggcccctggacaagggcttgagtggatgggatggatcaacccgaacagtggtggcacaaactatgcacagaagtttcagggcagggtcaccatgaccagggacacgtccactagcacagtgtacatggagctgagctctctgagatctgaagacacggccgtgtattactgtgcggggagctggggtggttactactttgactactggggccaagggaccctggtcaccgtctcctcaggtggaggcggttcaggcggaggtggctctggcggtggcggatcggacatccagatgacccagtctccatcctccctgtctgcatctgtaggagacagagtcaccatcacttgccgggcaagtcagagcgttagcagatatttaaattggtatcagcagaaaccagggaaagcccctaagctcctgatctatgatgcatccaatttggaaaccggggtcccatcaaggttcagtggcagtggatctgggacagatttcactctcaccatcagcagtctgcaacctgaagattttgcaacttactactgtcaacaggccgacagtttccctgtgacttttggccaggggaccaagctggagatcaaaggtggcggtggctcgggcggtggtgggtcgggtggcggcggatctcaggtgcagctggtgcagtctggggctgaggtgaagaagcctggggcctcagtgaaggtctcctgcaaggcttctggatacaccttcaccgagaatgagatgcactgggtgcgacaggcccctggacaagggcttgagtggatgggatggatcaacccgaacagtggtggcacaaactatgcacagaagtttcagggcagggtcaccatgaccagggacacgtccactagcacagtgtacatggagctgagctctctgagatctgaagacacggccgtgtattactgtgcggggagctggggtggttactactttgactactggggccaagggaccctggtcaccgtctcctcaggtggaggcggttcaggcggaggtggctctggcggtggcggatcggacatccagatgacccagtctccatcctccctgtctgcatctgtaggagacagagtcaccatcacttgccgggcaagtcagagcgttagcagatatttaaattggtatcagcagaaaccagggaaagcccctaagctcctgatctatgatgcatccaatttggaaaccggggtcccatcaaggttcagtggcagtggatctgggacagatttcactctcaccatcagcagtctgcaacctgaagattttgcaacttactactgtcaacaggccgacagtttccctgtgacttttggccaggggaccaagctggagatcaaa

SEQ ID NO: 115 - DNA, 1530 bp, synthetic construct
  misc_feature 1..1530: note = NK77.79_38-67 scFv
  source 1..1530: mol_type = other DNA
caggtgcagctggtgcagtctggggctgaggtgaagaagcctggggcctcagtgaaggtttcctgcaaggcatctggatacagtttcaccagctactatatgcactgggtgcgacaggcccctggacaagggcttgagtggatgggaataatcaaccctagtggtgggactacaagctacgcacagaagttccagggcagagtcaccatgaccagggacacgtccacgagcacagtctacatggagctgagcagcctgagatctgaggacacggccgtgtattactgtgctagagacaattccccgtatagctcaagctggtgggactactttgactactggggccaagggaccctggtcaccgtctcctcaggtggaggcggttcaggcggaggtggctctggcggtggcggatcggacatccagatgacccagtctccatcctccctgtctgcatctgtaggagacagagtcaccatcacttgccgggcaagtcaggacattcggcattatttagcatggtatcagcagaaaccagggaaagcccctaagctcctgatctatgacgcatccagtttgcaaagtggggtcccatcaaggttcagtggcagtggatctgggacagatttcactctcaccatcagcagtctgcaacctgaagattttgcaacttactactgtcaacagacctacgacgcacctatcaccttcggccaagggacacgactggagattaaaggtggcggtggctcgggcggtggtgggtcgggtggcggcggatctcaggtgcagctggtgcagtctggggctgaggtgaagaagcctgggtcctcggtgaaggtctcctgcaaggcttctggaggcaccttcagcagctatgctatcagctgggtgcgacaggcccctggacaagggcttgagtggatgggaggaatcacaccaatgtttggtacaacggactacgcacagaagttccagggcagagtcacgattaccgcggacgaatccacgagcacagcctacatggagctgagcagcctgagatctgaggacacggccgtgtattactgtgcgagagatgagcgggacggatacgccacagtggcttttgatatctggggccaagggacaatggtcaccgtctcttcaggtggaggcggttcaggcggaggtggctctggcggtggcggatcggatattgtgatgactcagtctccactctccctgcccgtcacccctggagagccggcctccatctcctgcaggtctagtcagagcctcctgcatagcaatggatacaactatttggattggtacctgcagaagccagggcagtctccacagctcctgatctatgatgcttctaatcttgagacaggggtccctgacaggttcagtggcagtggatcaggcacagattttacactgaaaatcagcagagtggaggctgaggatgttggggtttattactgcatgcaagggacgcattggcctcccacgttcggccaagggaccaaggtggaaatcaaa

SEQ ID NO: 116 - DNA, 1515 bp, synthetic construct
  misc_feature 1..1515: note = NK77.80_38-68 scFv
  source 1..1515: mol_type = other DNA
caggtgcagctggtgcagtctggggctgaggtgaagaagcctggggcctcagtgaaggtttcctgcaaggcatctggatacagtttcaccagctactatatgcactgggtgcgacaggcccctggacaagggcttgagtggatgggaataatcaaccctagtggtgggactacaagctacgcacagaagttccagggcagagtcaccatgaccagggacacgtccacgagcacagtctacatggagctgagcagcctgagatctgaggacacggccgtgtattactgtgctagagacaattccccgtatagctcaagctggtgggactactttgactactggggccaagggaccctggtcaccgtctcctcaggtggaggcggttcaggcggaggtggctctggcggtggcggatcggacatccagatgacccagtctccatcctccctgtctgcatctgtaggagacagagtcaccatcacttgccgggcaagtcaggacattcggcattatttagcatggtatcagcagaaaccagggaaagcccctaagctcctgatctatgacgcatccagtttgcaaagtggggtcccatcaaggttcagtggcagtggatctgggacagatttcactctcaccatcagcagtctgcaacctgaagattttgcaacttactactgtcaacagacctacgacgcacctatcaccttcggccaagggacacgactggagattaaaggtggcggtggctcgggcggtggtgggtcgggtggcggcggatctcaggtgcagctggtgcagtctggggctgaggtgaagaagcctggggcctcagtgaaggtttcctgcaaggcatctggatacaccttcaccagctactatatgcactgggtgcgacaggcccctggacaagggcttgagtggatgggaataatcaaccctagtgacggaggaacaagctacgcagacaagttccagggcagagtcaccatgaccagggacacgtccacgagcacagtctacatggagctgagcagcctgagatctgaggacacggccgtgtattactgtgctagagcgcttgcccccctgggatggggtgacggcatggatgtctggggccaagggacaacagtcaccgtctcttcaggtggaggcggttcaggcggaggtggctctggcggtggcggatcggacatccagatgacccagtctccatcctccctgtctgcatctgtaggagacagagtcaccatcacttgccaggcgagtcaggacattagcaactatttaaattggtatcagcagaaaccagggaaagcccctaagctcctgatctacgatgcatccaatttggaaacaggggtcccatcaaggttcagtggaagtggatctgggacagattttactctcaccatcagcagcctgcagcctgaagatttcgcaacatattactgtcaacagtcatatgatggacctatcaccttcggccaagggacacgactggagattaaa

SEQ ID NO: 117 - DNA, 1530 bp, synthetic construct
  misc_feature 1..1530: note = NK77.81_64-67 scFv
  source 1..1530: mol_type = other DNA
caggtgcagctggtgcagtctggggctgaggtgaagaagcctgggtcctcggtgaaggtctcctgcaaggcttctggatacaccttcaccagctatggaatcagctgggtgcgacaggcccctggacaagggcttgagtggatgggaggtatcatccctatctttggtacaacgaactacgcacagaagttccagggcagagtcacgattaccgcggacgaatccacgagcacagcctacatggagctgagcagcctgagatctgaggacacggccgtgtattactgtgcgagagatcatagcggcgatgggtacttcgatctctggggccgtggcaccctggtcactgtctcctcaggtggaggcggttcaggcggaggtggctctggcggtggcggatcggatattgtgatgactcagtctccactctccctgcccgtcacccctggagagccggcctccatctcctgcaggtctagtcagagcctcctgcactccaacggatacaactatttggattggtacctgcagaagccagggcagtctccacagctcctgatctatgatgcctcttcacttcagtccggggtccctgacaggttcagtggcagtggatcaggcacagattttacactgaaaatcagcagagtggaggctgaggatgttggggtttattactgcatgcaaggaacacactggcctcccacgttcggccaagggaccaaggtggaaatcaaaggtggcggtggctcgggcggtggtgggtcgggtggcggcggatctcaggtgcagctggtgcagtctggggctgaggtgaagaagcctgggtcctcggtgaaggtctcctgcaaggcttctggaggcaccttcagcagctatgctatcagctgggtgcgacaggcccctggacaagggcttgagtggatgggaggaatcacaccaatgtttggtacaacggactacgcacagaagttccagggcagagtcacgattaccgcggacgaatccacgagcacagcctacatggagctgagcagcctgagatctgaggacacggccgtgtattactgtgcgagagatgagcgggacggatacgccacagtggcttttgatatctggggccaagggacaatggtcaccgtctcttcaggtggaggcggttcaggcggaggtggctctggcggtggcggatcggatattgtgatgactcagtctccactctccctgcccgtcacccctggagagccggcctccatctcctgcaggtctagtcagagcctcctgcatagcaatggatacaactatttggattggtacctgcagaagccagggcagtctccacagctcctgatctatgatgcttctaatcttgagacaggggtccctgacaggttcagtggcagtggatcaggcacagattttacactgaaaatcagcagagtggaggctgaggatgttggggtttattactgcatgcaagggacgcattggcctcccacgttcggccaagggaccaaggtggaaatcaaa

SEQ ID NO: 118 - DNA, 1515 bp, synthetic construct
  misc_feature 1..1515: note = NK77.82_64-68 scFv
  source 1..1515: mol_type = other DNA
caggtgcagctggtgcagtctggggctgaggtgaagaagcctgggtcctcggtgaaggtctcctgcaaggcttctggatacaccttcaccagctatggaatcagctgggtgcgacaggcccctggacaagggcttgagtggatgggaggtatcatccctatctttggtacaacgaactacgcacagaagttccagggcagagtcacgattaccgcggacgaatccacgagcacagcctacatggagctgagcagcctgagatctgaggacacggccgtgtattactgtgcgagagatcatagcggcgatgggtacttcgatctctggggccgtggcaccctggtcactgtctcctcaggtggaggcggttcaggcggaggtggctctggcggtggcggatcggatattgtgatgactcagtctccactctccctgcccgtcacccctggagagccggcctccatctcctgcaggtctagtcagagcctcctgcactccaacggatacaactatttggattggtacctgcagaagccagggcagtctccacagctcctgatctatgatgcctcttcacttcagtccggggtccctgacaggttcagtggcagtggatcaggcacagattttacactgaaaatcagcagagtggaggctgaggatgttggggtttattactgcatgcaaggaacacactggcctcccacgttcggccaagggaccaaggtggaaatcaaaggtggcggtggctcgggcggtggtgggtcgggtggcggcggatctcaggtgcagctggtgcagtctggggctgaggtgaagaagcctggggcctcagtgaaggtttcctgcaaggcatctggatacaccttcaccagctactatatgcactgggtgcgacaggcccctggacaagggcttgagtggatgggaataatcaaccctagtgacggaggaacaagctacgcagacaagttccagggcagagtcaccatgaccagggacacgtccacgagcacagtctacatggagctgagcagcctgagatctgaggacacggccgtgtattactgtgctagagcgcttgcccccctgggatggggtgacggcatggatgtctggggccaagggacaacagtcaccgtctcttcaggtggaggcggttcaggcggaggtggctctggcggtggcggatcggacatccagatgacccagtctccatcctccctgtctgcatctgtaggagacagagtcaccatcacttgccaggcgagtcaggacattagcaactatttaaattggtatcagcagaaaccagggaaagcccctaagctcctgatctacgatgcatccaatttggaaacaggggtcccatcaaggttcagtggaagtggatctgggacagattttactctcaccatcagcagcctgcagcctgaagatttcgcaacatattactgtcaacagtcatatgatggacctatcaccttcggccaagggacacgactggagattaaa

SEQ ID NO: 119 - DNA, 1512 bp, synthetic construct
  misc_feature 1..1512: note = NK77.83_65-67 scFv
  source 1..1512: mol_type = other DNA
caggtgcagctggtgcagtctggggctgaggtgaagaagcctggggcctcagtgaaggtctcctgcaaggcttctggatacaccttcaccgagaatgagatgcactgggtgcgacaggcccctggacaagggcttgagtggatgggatggatcaacccgaacagtggtggcacaaactatgcacagaagtttcagggcagggtcaccatgaccagggacacgtccactagcacagtgtacatggagctgagctctctgagatctgaagacacggccgtgtattactgtgcggggagctggggtggttactactttgactactggggccaagggaccctggtcaccgtctcctcaggtggaggcggttcaggcggaggtggctctggcggtggcggatcggacatccagatgacccagtctccatcctccctgtctgcatctgtaggagacagagtcaccatcacttgccgggcaagtcagagcgttagcagatatttaaattggtatcagcagaaaccagggaaagcccctaagctcctgatctatgatgcatccaatttggaaaccggggtcccatcaaggttcagtggcagtggatctgggacagatttcactctcaccatcagcagtctgcaacctgaagattttgcaacttactactgtcaacaggccgacagtttccctgtgacttttggccaggggaccaagctggagatcaaaggtggcggtggctcgggcggtggtgggtcgggtggcggcggatctcaggtgcagctggtgcagtctggggctgaggtgaagaagcctgggtcctcggtgaaggtctcctgcaaggcttctggaggcaccttcagcagctatgctatcagctgggtgcgacaggcccctggacaagggcttgagtggatgggaggaatcacaccaatgtttggtacaacggactacgcacagaagttccagggcagagtcacgattaccgcggacgaatccacgagcacagcctacatggagctgagcagcctgagatctgaggacacggccgtgtattactgtgcgagagatgagcgggacggatacgccacagtggcttttgatatctggggccaagggacaatggtcaccgtctcttcaggtggaggcggttcaggcggaggtggctctggcggtggcggatcggatattgtgatgactcagtctccactctccctgcccgtcacccctggagagccggcctccatctcctgcaggtctagtcagagcctcctgcatagcaatggatacaactatttggattggtacctgcagaagccagggcagtctccacagctcctgatctatgatgcttctaatcttgagacaggggtccctgacaggttcagtggcagtggatcaggcacagattttacactgaaaatcagcagagtggaggctgaggatgttggggtttattactgcatgcaagggacgcattggcctcccacgttcggccaagggaccaaggtggaaatcaaa

SEQ ID NO: 120 - DNA, 1497 bp, synthetic construct
  misc_feature 1..1497: note = NK77.84_65-68 scFv
  source 1..1497: mol_type = other DNA
caggtgcagctggtgcagtctggggctgaggtgaagaagcctggggcctcagtgaaggtctcctgcaaggcttctggatacaccttcaccgagaatgagatgcactgggtgcgacaggcccctggacaagggcttgagtggatgggatggatcaacccgaacagtggtggcacaaactatgcacagaagtttcagggcagggtcaccatgaccagggacacgtccactagcacagtgtacatggagctgagctctctgagatctgaagacacggccgtgtattactgtgcggggagctggggtggttactactttgactactggggccaagggaccctggtcaccgtctcctcaggtggaggcggttcaggcggaggtggctctggcggtggcggatcggacatccagatgacccagtctccatcctccctgtctgcatctgtaggagacagagtcaccatcacttgccgggcaagtcagagcgttagcagatatttaaattggtatcagcagaaaccagggaaagcccctaagctcctgatctatgatgcatccaatttggaaaccggggtcccatcaaggttcagtggcagtggatctgggacagatttcactctcaccatcagcagtctgcaacctgaagattttgcaacttactactgtcaacaggccgacagtttccctgtgacttttggccaggggaccaagctggagatcaaaggtggcggtggctcgggcggtggtgggtcgggtggcggcggatctcaggtgcagctggtgcagtctggggctgaggtgaagaagcctggggcctcagtgaaggtttcctgcaaggcatctggatacaccttcaccagctactatatgcactgggtgcgacaggcccctggacaagggcttgagtggatgggaataatcaaccctagtgacggaggaacaagctacgcagacaagttccagggcagagtcaccatgaccagggacacgtccacgagcacagtctacatggagctgagcagcctgagatctgaggacacggccgtgtattactgtgctagagcgcttgcccccctgggatggggtgacggcatggatgtctggggccaagggacaacagtcaccgtctcttcaggtggaggcggttcaggcggaggtggctctggcggtggcggatcggacatccagatgacccagtctccatcctccctgtctgcatctgtaggagacagagtcaccatcacttgccaggcgagtcaggacattagcaactatttaaattggtatcagcagaaaccagggaaagcccctaagctcctgatctacgatgcatccaatttggaaacaggggtcccatcaaggttcagtggaagtggatctgggacagattttactctcaccatcagcagcctgcagcctgaagatttcgcaacatattactgtcaacagtcatatgatggacctatcaccttcggccaagggacacgactggagattaaa

SEQ ID NO: 121 - DNA, 23 bp, synthetic construct
  misc_feature 1..23: note = CD70 guide RNA 1
  source 1..23: mol_type = other DNA
tcaccaagcccgcgaccaatggg

SEQ ID NO: 122 - DNA, 23 bp, synthetic construct
  misc_feature 1..23: note = CD70 guide RNA 2
  source 1..23: mol_type = other DNA
gctttggtcccattggtcgcggg

SEQ ID NO: 123 - DNA, 23 bp, synthetic construct
  misc_feature 1..23: note = CD70 guide RNA 3
  source 1..23: mol_type = other DNA
accctcctccggcatcgccgcgg

SEQ ID NO: 124 - DNA, 20 bp, synthetic construct
  misc_feature 1..20: note = TGFBR2 gRNA 1
  source 1..20: mol_type = other DNA
cccctaccatgactttattc

SEQ ID NO: 125 - DNA, 20 bp, synthetic construct
  misc_feature 1..20: note = TGFBR2 gRNA 2
  source 1..20: mol_type = other DNA
attgcactcatcagagctac

SEQ ID NO: 126 - DNA, 20 bp, synthetic construct
  misc_feature 1..20: note = TGFBR2 gRNA 3
  source 1..20: mol_type = other DNA
agtcatggtaggggagcttg

SEQ ID NO: 127 - DNA, 20 bp, synthetic construct
  misc_feature 1..20: note = TGFBR2 gRNA 4
  source 1..20: mol_type = other DNA
tgctggcgatacgcgtccac

SEQ ID NO: 128 - DNA, 20 bp, synthetic construct
  misc_feature 1..20: note = TGFBR2 gRNA 5
  source 1..20: mol_type = other DNA
gtgagcaatcccccgggcga

SEQ ID NO: 129 - DNA, 20 bp, synthetic construct
  misc_feature 1..20: note = TGFBR2 gRNA 6
  source 1..20: mol_type = other DNA
aacgtgcggtgggatcgtgc

SEQ ID NO: 130 - DNA, 20 bp, synthetic construct
  misc_feature 1..20: note = CISH gRNA 1
  source 1..20: mol_type = other DNA
ctcaccagattcccgaaggt

SEQ ID NO: 131 - DNA, 20 bp, synthetic construct
  misc_feature 1..20: note = CISH gRNA 2
  source 1..20: mol_type = other DNA
ccgccttgtcatcaaccgtc

SEQ ID NO: 132 - DNA, 20 bp, synthetic construct
  misc_feature 1..20: note = CISH gRNA 3
  source 1..20: mol_type = other DNA
tctgcgttcaggggtaagcg

SEQ ID NO: 133 - DNA, 20 bp, synthetic construct
  misc_feature 1..20: note = CISH gRNA 4
  source 1..20: mol_type = other DNA
gcgcttacccctgaacgcag

SEQ ID NO: 134 - DNA, 20 bp, synthetic construct
  misc_feature 1..20: note = CISH gRNA 5
  source 1..20: mol_type = other DNA
cgcagaggaccatgtccccg

SEQ ID NO: 135 - DNA, 20 bp, synthetic construct
  misc_feature 1..20: note = NKG2A gRNA 1
  source 1..20: mol_type = other DNA
ggagctgatggtaaatctgc

SEQ ID NO: 136 - DNA, 20 bp, synthetic construct
  misc_feature 1..20: note = NKG2A gRNA 2
  source 1..20: mol_type = other DNA
ttgaaggtttaattccgcat

SEQ ID NO: 137 - DNA, 20 bp, synthetic construct
  misc_feature 1..20: note = NKG2A gRNA 3
  source 1..20: mol_type = other DNA
aacaactatcgttaccacag

SEQ ID NO: 138 - DNA, 2169 bp, synthetic construct
  misc_feature 1..2169: note = NK77.1_CD70_DB01_C03 construct
  source 1..2169: mol_type = other DNA
atggccttaccagtgaccgccttgctcctgccgctggccttgctgctccacgccgccaggccggactacaaagacgatgacgataaaggcggtggtggctctggtggtggcggatcccaggtgcagctggtgcagtctggggctgaggtgaagaagcctggggcctcagtgaaggtctcctgcaaggcttctggatacaccttcaccggccattatttgcactgggtgcgacaggcccctggacaagggcttgagtggatgggatggatcaaccctaacagtggtggcacaaactatgcacagaagtttcagggcagggtcaccatgaccagggacacgtccactagcacagtgtacatggagctgagcagcctgagatctgaggacacggccgtgtattactgtgttagaggaagcggttggtatgacctggactactggggccaagggaccctggtcaccgtctcctcaggtggaggcggttcaggcggaggtggctctggcggtggcggatcggacatccagatgacccagtctccatcctccctgtctgcatctgtaggagacagagtcaccatcacttgccgggcaagtcagaatattggcacatatttagcttggtatcagcagaaaccagggaaagcccctaagctcctgatctatgacgcatccaacttggagactggggtcccatcaaggttcagtggcagtggatctgggacagatttcactctcaccatcagcagtctgcaacctgaagattttgcaacttactactgtcaacagagttacagaatccctctcaccttcggccaagggacacgactggagattaaaaccacgacgccagcgccgcggccaccaacaccggcgcccaccatcgcgtcgcagcccctgtccctgcgcccagaggcgtgccggccagcggcggggggcgcagtgcacacgagggggctggacttcgcctgtgatatctacatctgggcgcccttggccgggacttgtggggtccttctcctgtcactggttatcaccctttactgccggagggaccagaggctgccccccgatgcccacaagccccctgggggaggcagtttccggacccccatccaagaggagcaggccgacgcccactccaccctggccaagatcagagtgaagttcagcaggagcgcagacgcccccgcgtaccagcagggccagaaccagctctataacgagctcaatctaggacgaagagaggagtacgatgttttggacaagagacgtggccgggaccctgagatggggggaaagccgagaaggaagaaccctcaggaaggcctgtacaatgaactgcagaaagataagatggcggaggcctacagtgagattgggatgaaaggcgagcgccggaggggcaaggggcacgatggcctttaccagggtctcagtacagccaccaaggacacctacgacgcccttcacatgcaggccctgccccctcgcggctctggcgagggaaggggttccctgcttacttgcggcgacgtcgaagagaatcccggtccgatggccctcccagtaactgccctccttttgcccctcgcactccttcttcatgccgctcgccccaactgggtcaacgtgattagcgatttgaagaaaatcgaggaccttatacagtctatgcatattgacgctacactgtatactgagagtgatgtacacccgtcctgtaaggtaacggccatgaaatgctttcttctggagctccaggtcatcagcttggagtctggggacgcaagcatccacgatacggttgaaaacctcatcatccttgcgaacaactctctctcatctaatggaaacgttacagagagtgggtgtaaggagtgcgaagagttggaagaaaaaaacatcaaagaatttcttcaatccttcgttcacatagtgcaaatgttcattaacacgtccactaccacacccgccccgaggccacctacgccggcaccgactatcgccagtcaacccctctctctgcgccccgaggcttgccggcctgcggctggtggggcggtccacacccggggcctggattttgcgtgcgatatatacatctgggcacctcttgccggcacctgcggagtgctgcttctctcactcgttattacgctgtactgctaa

SEQ ID NO: 139 - DNA, 2172 bp, synthetic construct
  misc_feature 1..2172: note = NK77.2_CD70_DB01_D02 construct
  source 1..2172: mol_type = other DNA
atggccttaccagtgaccgccttgctcctgccgctggccttgctgctccacgccgccaggccggactacaaagacgatgacgataaaggcggtggtggctctggtggtggcggatcccaggtgcagctggtgcagtctggggctgaggtgaagaagcctggggcctcagtgaaggtttcctgcaaggcatctggatacaccttcaccaactactatatgcactgggtgcgacaggcccctggacaagggcttgagtggatgggaataatcaaccctagtggtgggagcacaagctacgcacagaagttccagggcagagtcaccatgaccagggacacgtccacgagcacagtctacatggagctgagcagcctgagatctgaggacacggccgtgtattactgtgctagagaactaggagtcgccgggtacttcgatctctggggccgtggcaccctggtcactgtctcctcaggtggaggcggttcaggcggaggtggctctggcggtggcggatcggacatccagatgacccagtctccatcctccctgtctgcatctgtaggagacagagtcaccatcacttgccgggcgagtcagaggattagcaattggttagcctggtatcagcagaaaccagggaaagcccctaagctcctgatctatgatgcatccaacttggaaaccggggtcccatccaggttcagtggcagtggatctgggacggattttactctcaccatcagcagcctgcagcctgaagattttgcaacttattactgtcaacagacctatagtcctccccctacttttggccaggggaccaagctggagatcaaaaccacgacgccagcgccgcggccaccaacaccggcgcccaccatcgcgtcgcagcccctgtccctgcgcccagaggcgtgccggccagcggcggggggcgcagtgcacacgagggggctggacttcgcctgtgatatctacatctgggcgcccttggccgggacttgtggggtccttctcctgtcactggttatcaccctttactgccggagggaccagaggctgccccccgatgcccacaagccccctgggggaggcagtttccggacccccatccaagaggagcaggccgacgcccactccaccctggccaagatcagagtgaagttcagcaggagcgcagacgcccccgcgtaccagcagggccagaaccagctctataacgagctcaatctaggacgaagagaggagtacgatgttttggacaagagacgtggccgggaccctgagatggggggaaagccgagaaggaagaaccctcaggaaggcctgtacaatgaactgcagaaagataagatggcggaggcctacagtgagattgggatgaaaggcgagcgccggaggggcaaggggcacgatggcctttaccagggtctcagtacagccaccaaggacacctacgacgcccttcacatgcaggccctgccccctcgcggctctggcgagggaaggggttccctgcttacttgcggcgacgtcgaagagaatcccggtccgatggccctcccagtaactgccctccttttgcccctcgcactccttcttcatgccgctcgccccaactgggtcaacgtgattagcgatttgaagaaaatcgaggaccttatacagtctatgcatattgacgctacactgtatactgagagtgatgtacacccgtcctgtaaggtaacggccatgaaatgctttcttctggagctccaggtcatcagcttggagtctggggacgcaagcatccacgatacggttgaaaacctcatcatccttgcgaacaactctctctcatctaatggaaacgttacagagagtgggtgtaaggagtgcgaagagttggaagaaaaaaacatcaaagaatttcttcaatccttcgttcacatagtgcaaatgttcattaacacgtccactaccacacccgccccgaggccacctacgccggcaccgactatcgccagtcaacccctctctctgcgccccgaggcttgccggcctgcggctggtggggcggtccacacccggggcctggattttgcgtgcgatatatacatctgggcacctcttgccggcacctgcggagtgctgcttctctcactcgttattacgctgtactgctaa

SEQ ID NO: 140 - DNA, 2199 bp, synthetic construct
  misc_feature 1..2199: note = NK77.3_CD70_DB01_E06 construct
  source 1..2199: mol_type = other DNA
atggccttaccagtgaccgccttgctcctgccgctggccttgctgctccacgccgccaggccggactacaaagacgatgacgataaaggcggtggtggctctggtggtggcggatcccaggtgcagctggtgcagtctggggctgaggtgaagaagcctggggcctcagtgaaggtttcctgcaaggcatctggatacaccttcaccggttactatatccactgggtgcgacaggcccctggacaagggcttgagtggatgggaataatcaaccctagtggtggaagcacaagctacgcacagaagttccagggcagagtcaccatgaccagggacacgtccacgagcacagtctacatggagctgagcagcctgagatctgaggacacggccgtgtattactgtgctagagacctgtcagggatcgacggatatattggtttctttgactactggggccaagggaccctggtcaccgtctcctcaggtggaggcggttcaggcggaggtggctctggcggtggcggatcggatattgtgatgactcagtctccactctccctgcccgtcacccctggagagccggcctccatctcctgcaggtctagtcagagcctcctgcactctaacggatacaactatttggattggtacctgcagaagccagggcagtctccacagctcctgatctatgcagcctcttcattacaatccggggtccctgacaggttcagtggcagtggatcaggcacagattttacactgaaaatcagcagagtggaggctgaggatgttggggtttattactgcatgcaagctctacaaactcctatcaccttcggccaagggacacgactggagattaaaaccacgacgccagcgccgcggccaccaacaccggcgcccaccatcgcgtcgcagcccctgtccctgcgcccagaggcgtgccggccagcggcggggggcgcagtgcacacgagggggctggacttcgcctgtgatatctacatctgggcgcccttggccgggacttgtggggtccttctcctgtcactggttatcaccctttactgccggagggaccagaggctgccccccgatgcccacaagccccctgggggaggcagtttccggacccccatccaagaggagcaggccgacgcccactccaccctggccaagatcagagtgaagttcagcaggagcgcagacgcccccgcgtaccagcagggccagaaccagctctataacgagctcaatctaggacgaagagaggagtacgatgttttggacaagagacgtggccgggaccctgagatggggggaaagccgagaaggaagaaccctcaggaaggcctgtacaatgaactgcagaaagataagatggcggaggcctacagtgagattgggatgaaaggcgagcgccggaggggcaaggggcacgatggcctttaccagggtctcagtacagccaccaaggacacctacgacgcccttcacatgcaggccctgccccctcgcggctctggcgagggaaggggttccctgcttacttgcggcgacgtcgaagagaatcccggtccgatggccctcccagtaactgccctccttttgcccctcgcactccttcttcatgccgctcgccccaactgggtcaacgtgattagcgatttgaagaaaatcgaggaccttatacagtctatgcatattgacgctacactgtatactgagagtgatgtacacccgtcctgtaaggtaacggccatgaaatgctttcttctggagctccaggtcatcagcttggagtctggggacgcaagcatccacgatacggttgaaaacctcatcatccttgcgaacaactctctctcatctaatggaaacgttacagagagtgggtgtaaggagtgcgaagagttggaagaaaaaaacatcaaagaatttcttcaatccttcgttcacatagtgcaaatgttcattaacacgtccactaccacacccgccccgaggccacctacgccggcaccgactatcgccagtcaacccctctctctgcgccccgaggcttgccggcctgcggctggtggggcggtccacacccggggcctggattttgcgtgcgatatatacatctgggcacctcttgccggcacctgcggagtgctgcttctctcactcgttattacgctgtactgctaa

SEQ ID NO: 141 - DNA, 2172 bp, synthetic construct
  misc_feature 1..2172: note = NK77.4_CD70_DB01_G04 construct
  source 1..2172: mol_type = other DNA
atggccttaccagtgaccgccttgctcctgccgctggccttgctgctccacgccgccaggccggactacaaagacgatgacgataaaggcggtggtggctctggtggtggcggatcccaggtgcagctggtgcagtctggggctgaggtgaagaagcctggggcctcagtgaaggtttcctgcaaggcatctggaggaaccttcagaagccatgtcatatcctgggtgcgacaggcccctggacaagggcttgagtggatgggaataatcgatcctagtggtggcagcacaagctacgcacagaggttccagggcagagtcaccatgaccagggacacgtccacgagcacagtctacatggagctgagcagcctgagatctgaggacacggccgtgtattactgtgctaaagattacactgggctgcttggaatggatgtctggggccaagggacaaccgtcaccgtctcttcaggtggaggcggttcaggcggaggtggctctggcggtggcggatcggacatccagatgacccagtctccatcctccctgtctgcatctgtaggagacagagtcaccatcacttgccgggcaagtcaggacattgacacctatttagcctggtatcagcagaaaccagggaaagcccctaagctcctgatctatgctgcatccagtttgcaaagtggggtcccatcaaggttcagtggcagtggatctgggacagatttcactctcaccatcagcagtctgcaacctgaagattttgcaacttactactgtcaacagagttacacaacccctttcacgttcggccaagggaccaaggtggaaatcaaaaccacgacgccagcgccgcggccaccaacaccggcgcccaccatcgcgtcgcagcccctgtccctgcgcccagaggcgtgccggccagcggcggggggcgcagtgcacacgagggggctggacttcgcctgtgatatctacatctgggcgcccttggccgggacttgtggggtccttctcctgtcactggttatcaccctttactgccggagggaccagaggctgccccccgatgcccacaagccccctgggggaggcagtttccggacccccatccaagaggagcaggccgacgcccactccaccctggccaagatcagagtgaagttcagcaggagcgcagacgcccccgcgtaccagcagggccagaaccagctctataacgagctcaatctaggacgaagagaggagtacgatgttttggacaagagacgtggccgggaccctgagatggggggaaagccgagaaggaagaaccctcaggaaggcctgtacaatgaactgcagaaagataagatggcggaggcctacagtgagattgggatgaaaggcgagcgccggaggggcaaggggcacgatggcctttaccagggtctcagtacagccaccaaggacacctacgacgcccttcacatgcaggccctgccccctcgcggctctggcgagggaaggggttccctgcttacttgcggcgacgtcgaagagaatcccggtccgatggccctcccagtaactgccctccttttgcccctcgcactccttcttcatgccgctcgccccaactgggtcaacgtgattagcgatttgaagaaaatcgaggaccttatacagtctatgcatattgacgctacactgtatactgagagtgatgtacacccgtcctgtaaggtaacggccatgaaatgctttcttctggagctccaggtcatcagcttggagtctggggacgcaagcatccacgatacggttgaaaacctcatcatccttgcgaacaactctctctcatctaatggaaacgttacagagagtgggtgtaaggagtgcgaagagttggaagaaaaaaacatcaaagaatttcttcaatccttcgttcacatagtgcaaatgttcattaacacgtccactaccacacccgccccgaggccacctacgccggcaccgactatcgccagtcaacccctctctctgcgccccgaggcttgccggcctgcggctggtggggcggtccacacccggggcctggattttgcgtgcgatatatacatctgggcacctcttgccggcacctgcggagtgctgcttctctcactcgttattacgctgtactgctaa

SEQ ID NO: 142 - DNA, 2172 bp, synthetic construct
  misc_feature 1..2172: note = NK77.5_CD70_DB01_G05 construct
  source 1..2172: mol_type = other DNA
atggccttaccagtgaccgccttgctcctgccgctggccttgctgctccacgccgccaggccggactacaaagacgatgacgataaaggcggtggtggctctggtggtggcggatcccaggtgcagctggtgcagtctggggctgaggtgaagaagcctggggcctcagtgaaggtctcctgcaaggcttctggatacaccttcatcgactattatatccattgggtgcgacaggcccctggacaagggcttgagtggatgggatggatgaaccccaacagtggtaacacaggctatgcacagaagttccagggcagagtcaccatgaccagggacacctccacaagcacagtctacatggagctgagcagcctgagatctgaggacacggccgtgtattactgtgcgagaggcctttccggctacgacttggacgactactggggccaagggaccctggtcaccgtctcctcaggtggaggcggttcaggcggaggtggctctggcggtggcggatcggacatccagatgacccagtctccatcctccctgtctgcatctgtaggagacagagtcaccatcacttgccaggcaagtcaggacattagcaactatttaaattggtatcagcagaaaccagggaaagcccctaagctcctgatctatgatgcatccagtttggaaagtggggtcccatcaaggttcagtggcagtggatctgggacagatttcactctcaccatcagcagtctgcaacctgaagattttgcaacttactactgtcaacagagttaccgatcacctctcactttcggcggagggaccaaggtggagatcaaaaccacgacgccagcgccgcggccaccaacaccggcgcccaccatcgcgtcgcagcccctgtccctgcgcccagaggcgtgccggccagcggcggggggcgcagtgcacacgagggggctggacttcgcctgtgatatctacatctgggcgcccttggccgggacttgtggggtccttctcctgtcactggttatcaccctttactgccggagggaccagaggctgccccccgatgcccacaagccccctgggggaggcagtttccggacccccatccaagaggagcaggccgacgcccactccaccctggccaagatcagagtgaagttcagcaggagcgcagacgcccccgcgtaccagcagggccagaaccagctctataacgagctcaatctaggacgaagagaggagtacgatgttttggacaagagacgtggccgggaccctgagatggggggaaagccgagaaggaagaaccctcaggaaggcctgtacaatgaactgcagaaagataagatggcggaggcctacagtgagattgggatgaaaggcgagcgccggaggggcaaggggcacgatggcctttaccagggtctcagtacagccaccaaggacacctacgacgcccttcacatgcaggccctgccccctcgcggctctggcgagggaaggggttccctgcttacttgcggcgacgtcgaagagaatcccggtccgatggccctcccagtaactgccctccttttgcccctcgcactccttcttcatgccgctcgccccaactgggtcaacgtgattagcgatttgaagaaaatcgaggaccttatacagtctatgcatattgacgctacactgtatactgagagtgatgtacacccgtcctgtaaggtaacggccatgaaatgctttcttctggagctccaggtcatcagcttggagtctggggacgcaagcatccacgatacggttgaaaacctcatcatccttgcgaacaactctctctcatctaatggaaacgttacagagagtgggtgtaaggagtgcgaagagttggaagaaaaaaacatcaaagaatttcttcaatccttcgttcacatagtgcaaatgttcattaacacgtccactaccacacccgccccgaggccacctacgccggcaccgactatcgccagtcaacccctctctctgcgccccgaggcttgccggcctgcggctggtggggcggtccacacccggggcctggattttgcgtgcgatatatacatctgggcacctcttgccggcacctgcggagtgctgcttctctcactcgttattacgctgtactgctaa

SEQ ID NO: 143 - DNA, 2169 bp, synthetic construct
  misc_feature 1..2169: note = NK77.6_CD70_DB01_G07 construct
  source 1..2169: mol_type = other DNA
atggccttaccagtgaccgccttgctcctgccgctggccttgctgctccacgccgccaggccggactacaaagacgatgacgataaaggcggtggtggctctggtggtggcggatcccaggtgcagctggtgcagtctggggctgaggtgaagaagcctggggcctcagtgaaggtttcctgcaaggcatctggatacaccttcaccagctactatatgcactgggtgcgacaggcccctggacaagggcttgagtggatgggatggatcaacccgaacagtggtggcacaaaatacgcacataagttccagggcagagtcaccatgaccagggacacgtccacgagcacagtctacatggagctgagcagcctgagatctgaggacacggccgtgtattactgtgctagaggactgtcaggttacgattttgactactggggccaagggaccacagtcaccgtctcctcaggtggaggcggttcaggcggaggtggctctggcggtggcggatcggacatccagatgacccagtctccatcctccctgtctgcatctgtaggagacagagtcaccatcacttgccaggcgagtcaggacattagcaactatttaaattggtatcagcagaaaccagggaaagcccctaagctcctgatctacgatgcatccaatttggaaacaggggtcccatcaaggttcagtggaagtggatctgggacagattttactttgaccatcagcagcctgcagcctgaagattttgcaacatattactgtcaacaggcttataggtggcctatcaccttcggccaagggacacgactggagattaaaaccacgacgccagcgccgcggccaccaacaccggcgcccaccatcgcgtcgcagcccctgtccctgcgcccagaggcgtgccggccagcggcggggggcgcagtgcacacgagggggctggacttcgcctgtgatatctacatctgggcgcccttggccgggacttgtggggtccttctcctgtcactggttatcaccctttactgccggagggaccagaggctgccccccgatgcccacaagccccctgggggaggcagtttccggacccccatccaagaggagcaggccgacgcccactccaccctggccaagatcagagtgaagttcagcaggagcgcagacgcccccgcgtaccagcagggccagaaccagctctataacgagctcaatctaggacgaagagaggagtacgatgttttggacaagagacgtggccgggaccctgagatggggggaaagccgagaaggaagaaccctcaggaaggcctgtacaatgaactgcagaaagataagatggcggaggcctacagtgagattgggatgaaaggcgagcgccggaggggcaaggggcacgatggcctttaccagggtctcagtacagccaccaaggacacctacgacgcccttcacatgcaggccctgccccctcgcggctctggcgagggaaggggttccctgcttacttgcggcgacgtcgaagagaatcccggtccgatggccctcccagtaactgccctccttttgcccctcgcactccttcttcatgccgctcgccccaactgggtcaacgtgattagcgatttgaagaaaatcgaggaccttatacagtctatgcatattgacgctacactgtatactgagagtgatgtacacccgtcctgtaaggtaacggccatgaaatgctttcttctggagctccaggtcatcagcttggagtctggggacgcaagcatccacgatacggttgaaaacctcatcatccttgcgaacaactctctctcatctaatggaaacgttacagagagtgggtgtaaggagtgcgaagagttggaagaaaaaaacatcaaagaatttcttcaatccttcgttcacatagtgcaaatgttcattaacacgtccactaccacacccgccccgaggccacctacgccggcaccgactatcgccagtcaacccctctctctgcgccccgaggcttgccggcctgcggctggtggggcggtccacacccggggcctggattttgcgtgcgatatatacatctgggcacctcttgccggcacctgcggagtgctgcttctctcactcgttattacgctgtactgctaa

SEQ ID NO: 144 - DNA, 2172 bp, synthetic construct
  misc_feature 1..2172: note = NK77.7_CD70_DB01_G11 construct
  source 1..2172: mol_type = other DNA
atggccttaccagtgaccgccttgctcctgccgctggccttgctgctccacgccgccaggccggactacaaagacgatgacgataaaggcggtggtggctctggtggtggcggatcccaggtgcagctggtgcagtctggggctgaggtgaagaagcctggggcctcagtgaaggtttcctgcaaggcatctggatacaccttcaccggctactatatgcactgggtgcgacaggcccctggacaagggcttgagtggatgggatggatgaaccctaatagtggtaacacaggctacgcacagaagttccagggcagagtcaccatgaccagggacacgtccacgagcacagtctacatggagctgagcagcctgagatctgaggacacggccgtgtattactgtgctagagggaccgacgtgtatggagactttgactactggggccaagggaccctggtcaccgtctcctcaggtggaggcggttcaggcggaggtggctctggcggtggcggatcggacatccagatgacccagtctccatcctccctgtctgcatctgtaggagacagagtcaccatcacttgccgggcaagtcagagcattagcagctatttaaattggtatcagcagaaaccagggaaagcccctaagctcctgatctatgatgcatcctacttggaaacaggggtcccatcaaggttcagtggcagtggatctgggacagatttcactctcaccatcagcagtctgcaacctgaagattttgcaacttactactgtcaacagagttacacaattcctcctacgttcggccaagggaccaaggtggaaatcaaaaccacgacgccagcgccgcggccaccaacaccggcgcccaccatcgcgtcgcagcccctgtccctgcgcccagaggcgtgccggccagcggcggggggcgcagtgcacacgagggggctggacttcgcctgtgatatctacatctgggcgcccttggccgggacttgtggggtccttctcctgtcactggttatcaccctttactgccggagggaccagaggctgccccccgatgcccacaagccccctgggggaggcagtttccggacccccatccaagaggagcaggccgacgcccactccaccctggccaagatcagagtgaagttcagcaggagcgcagacgcccccgcgtaccagcagggccagaaccagctctataacgagctcaatctaggacgaagagaggagtacgatgttttggacaagagacgtggccgggaccctgagatggggggaaagccgagaaggaagaaccctcaggaaggcctgtacaatgaactgcagaaagataagatggcggaggcctacagtgagattgggatgaaaggcgagcgccggaggggcaaggggcacgatggcctttaccagggtctcagtacagccaccaaggacacctacgacgcccttcacatgcaggccctgccccctcgcggctctggcgagggaaggggttccctgcttacttgcggcgacgtcgaagagaatcccggtccgatggccctcccagtaactgccctccttttgcccctcgcactccttcttcatgccgctcgccccaactgggtcaacgtgattagcgatttgaagaaaatcgaggaccttatacagtctatgcatattgacgctacactgtatactgagagtgatgtacacccgtcctgtaaggtaacggccatgaaatgctttcttctggagctccaggtcatcagcttggagtctggggacgcaagcatccacgatacggttgaaaacctcatcatccttgcgaacaactctctctcatctaatggaaacgttacagagagtgggtgtaaggagtgcgaagagttggaagaaaaaaacatcaaagaatttcttcaatccttcgttcacatagtgcaaatgttcattaacacgtccactaccacacccgccccgaggccacctacgccggcaccgactatcgccagtcaacccctctctctgcgccccgaggcttgccggcctgcggctggtggggcggtccacacccggggcctggattttgcgtgcgatatatacatctgggcacctcttgccggcacctgcggagtgctgcttctctcactcgttattacgctgtactgctaa

SEQ ID NO: 145 - DNA, 2193 bp, synthetic construct
  misc_feature 1..2193: note = NK77.9_CD70_DB02_A03 construct
  source 1..2193: mol_type = other DNA
atggccttaccagtgaccgccttgctcctgccgctggccttgctgctccacgccgccaggccggactacaaagacgatgacgataaaggcggtggtggctctggtggtggcggatcccaggtgcagctggtgcagtctggggctgaggtgaagaagcctgggtcctcggtgaaggtctcctgcaaggcttctggatacaccttcacagagaacgaaatgcattgggtgcgacaggcccctggacaagggcttgagtggatgggaggcatcatccctatctttggtacagcaaactacgcacagaagttccagggcagagtcacgattaccgcggacgaatccacgagcacagcctacatggagctgagcagcctgagatctgaggacacggccgtgtattactgtgcgagagagggaggaaccgccatggccaccggttattactactatgggatggacgtgtggggccaagggaccaccgtcaccgtctcctcaggtggaggcggttcaggcggaggtggctctggcggtggcggatcggacatccagatgacccagtctccatcctccctgtctgcatctgtaggagacagagtcaccatcacttgccaggcgagtcaggacattagcaactatttaaattggtatcagcagaaaccagggaaagcccctaagctcctgatctacgatgcatccaatttggaaacaggggtcccatcaaggttcagtggaagtggatctgggacagattttactctcaccatcagcagcctgcagcctgaagattttgcaacatattactgtcaacagagctattccacccctctcactttcggccaggggaccaaggtggagatcaaaaccacgacgccagcgccgcggccaccaacaccggcgcccaccatcgcgtcgcagcccctgtccctgcgcccagaggcgtgccggccagcggcggggggcgcagtgcacacgagggggctggacttcgcctgtgatatctacatctgggcgcccttggccgggacttgtggggtccttctcctgtcactggttatcaccctttactgccggagggaccagaggctgccccccgatgcccacaagccccctgggggaggcagtttccggacccccatccaagaggagcaggccgacgcccactccaccctggccaagatcagagtgaagttcagcaggagcgcagacgcccccgcgtaccagcagggccagaaccagctctataacgagctcaatctaggacgaagagaggagtacgatgttttggacaagagacgtggccgggaccctgagatggggggaaagccgagaaggaagaaccctcaggaaggcctgtacaatgaactgcagaaagataagatggcggaggcctacagtgagattgggatgaaaggcgagcgccggaggggcaaggggcacgatggcctttaccagggtctcagtacagccaccaaggacacctacgacgcccttcacatgcaggccctgccccctcgcggctctggcgagggaaggggttccctgcttacttgcggcgacgtcgaagagaatcccggtccgatggccctcccagtaactgccctccttttgcccctcgcactccttcttcatgccgctcgccccaactgggtcaacgtgattagcgatttgaagaaaatcgaggaccttatacagtctatgcatattgacgctacactgtatactgagagtgatgtacacccgtcctgtaaggtaacggccatgaaatgctttcttctggagctccaggtcatcagcttggagtctggggacgcaagcatccacgatacggttgaaaacctcatcatccttgcgaacaactctctctcatctaatggaaacgttacagagagtgggtgtaaggagtgcgaagagttggaagaaaaaaacatcaaagaatttcttcaatccttcgttcacatagtgcaaatgttcattaacacgtccactaccacacccgccccgaggccacctacgccggcaccgactatcgccagtcaacccctctctctgcgccccgaggcttgccggcctgcggctggtggggcggtccacacccggggcctggattttgcgtgcgatatatacatctgggcacctcttgccggcacctgcggagtgctgcttctctcactcgttattacgctgtactgctaa

SEQ ID NO: 146 - DNA, 2187 bp, synthetic construct
  misc_feature 1..2187: note = NK77.10_CD70_DB02_A04 construct
  source 1..2187: mol_type = other DNA
atggccttaccagtgaccgccttgctcctgccgctggccttgctgctccacgccgccaggccggactacaaagacgatgacgataaaggcggtggtggctctggtggtggcggatcccaggtgcagctggtgcagtctggggctgaggtgaagaagcctggggcctcagtgaaggtttcctgcaaggcatctggatacaccttcaccgagaatgaaatgcactgggtgcgacaggcccctggacaagggcttgagtggatgggatggatcaactctaatggtggctacacagggtacgcactgaagttccagggcagagtcaccatgaccagggacacgtccacgagcacagtctacatggagctgagcagcctgagatctgaggacacggccgtgtattactgtgctagagccagtaattacggaggacactttgactactggggccaagggaccctggtcaccgtctcctcaggtggaggcggttcaggcggaggtggctctggcggtggcggatcggatattgtgatgactcagtctccactctccctgcccgtcacccctggagagccggcctccatctcctgcaggtctagtcagagcctcctgcattccaacggatacaactatttggattggtacctgcagaagccagggcagtctccacagctcctgatctatcaggcatctagcctggagtccggggtccctgacaggttcagtggcagtggatcaggcacagattttacactgaaaatcagcagagtggaggctgaggatgttggggtttattactgcatgcaaggaacgcactggcctccaactttcggcggagggaccaaggtggagatcaaaaccacgacgccagcgccgcggccaccaacaccggcgcccaccatcgcgtcgcagcccctgtccctgcgcccagaggcgtgccggccagcggcggggggcgcagtgcacacgagggggctggacttcgcctgtgatatctacatctgggcgcccttggccgggacttgtggggtccttctcctgtcactggttatcaccctttactgccggagggaccagaggctgccccccgatgcccacaagccccctgggggaggcagtttccggacccccatccaagaggagcaggccgacgcccactccaccctggccaagatcagagtgaagttcagcaggagcgcagacgcccccgcgtaccagcagggccagaaccagctctataacgagctcaatctaggacgaagagaggagtacgatgttttggacaagagacgtggccgggaccctgagatggggggaaagccgagaaggaagaaccctcaggaaggcctgtacaatgaactgcagaaagataagatggcggaggcctacagtgagattgggatgaaaggcgagcgccggaggggcaaggggcacgatggcctttaccagggtctcagtacagccaccaaggacacctacgacgcccttcacatgcaggccctgccccctcgcggctctggcgagggaaggggttccctgcttacttgcggcgacgtcgaagagaatcccggtccgatggccctcccagtaactgccctccttttgcccctcgcactccttcttcatgccgctcgccccaactgggtcaacgtgattagcgatttgaagaaaatcgaggaccttatacagtctatgcatattgacgctacactgtatactgagagtgatgtacacccgtcctgtaaggtaacggccatgaaatgctttcttctggagctccaggtcatcagcttggagtctggggacgcaagcatccacgatacggttgaaaacctcatcatccttgcgaacaactctctctcatctaatggaaacgttacagagagtgggtgtaaggagtgcgaagagttggaagaaaaaaacatcaaagaatttcttcaatccttcgttcacatagtgcaaatgttcattaacacgtccactaccacacccgccccgaggccacctacgccggcaccgactatcgccagtcaacccctctctctgcgccccgaggcttgccggcctgcggctggtggggcggtccacacccggggcctggattttgcgtgcgatatatacatctgggcacctcttgccggcacctgcggagtgctgcttctctcactcgttattacgctgtactgctaa

SEQ ID NO: 147 - DNA, 2172 bp, synthetic construct
  misc_feature 1..2172: note = NK77.11_CD70_DB02_A05 construct
  source 1..2172: mol_type = other DNA
atggccttaccagtgaccgccttgctcctgccgctggccttgctgctccacgccgccaggccggactacaaagacgatgacgataaaggcggtggtggctctggtggtggcggatcccaggtgcagctggtgcagtctggggctgaggtgaagaagcctggggcctcagtgaaggtttcctgcaaggcatctggatacaccttcaccagctactatatgcactgggtgcgacaggcccctggacaagggcttgagtggatgggaataatcaaccctagtggtggcagcacaatatacgcacagaagttccagggcagagtcaccatgaccagggacacgtccacgagcacagtctacatggagctgagcagcctgagatctgaggacacggccgtgtattactgtgctaaagacatgggagcgtgggcagctggttttgactactggggccaagggaccctggtcaccgtctcctcaggtggaggcggttcaggcggaggtggctctggcggtggcggatcggacatccagatgacccagtctccatcctccctgtctgcatctgtaggagacagagtcaccatcacttgccaagcaagtcaggacattagcaactatttaaattggtatcagcagaaaccagggaaagcccctaagctcctgatctatgctacctccaccttggctaacggggtcccatcaaggttcagtggcagtggatctgggacagatttcactctcaccatcagcagtctgcaacctgaagattttgcaacttactactgtcaacagagttacagtacgcttaccttcggccaagggacacgactggagattaaaaccacgacgccagcgccgcggccaccaacaccggcgcccaccatcgcgtcgcagcccctgtccctgcgcccagaggcgtgccggccagcggcggggggcgcagtgcacacgagggggctggacttcgcctgtgatatctacatctgggcgcccttggccgggacttgtggggtccttctcctgtcactggttatcaccctttactgccggagggaccagaggctgccccccgatgcccacaagccccctgggggaggcagtttccggacccccatccaagaggagcaggccgacgcccactccaccctggccaagatcagagtgaagttcagcaggagcgcagacgcccccgcgtaccagcagggccagaaccagctctataacgagctcaatctaggacgaagagaggagtacgatgttttggacaagagacgtggccgggaccctgagatggggggaaagccgagaaggaagaaccctcaggaaggcctgtacaatgaactgcagaaagataagatggcggaggcctacagtgagattgggatgaaaggcgagcgccggaggggcaaggggcacgatggcctttaccagggtctcagtacagccaccaaggacacctacgacgcccttcacatgcaggccctgccccctcgcggctctggcgagggaaggggttccctgcttacttgcggcgacgtcgaagagaatcccggtccgatggccctcccagtaactgccctccttttgcccctcgcactccttcttcatgccgctcgccccaactgggtcaacgtgattagcgatttgaagaaaatcgaggaccttatacagtctatgcatattgacgctacactgtatactgagagtgatgtacacccgtcctgtaaggtaacggccatgaaatgctttcttctggagctccaggtcatcagcttggagtctggggacgcaagcatccacgatacggttgaaaacctcatcatccttgcgaacaactctctctcatctaatggaaacgttacagagagtgggtgtaaggagtgcgaagagttggaagaaaaaaacatcaaagaatttcttcaatccttcgttcacatagtgcaaatgttcattaacacgtccactaccacacccgccccgaggccacctacgccggcaccgactatcgccagtcaacccctctctctgcgccccgaggcttgccggcctgcggctggtggggcggtccacacccggggcctggattttgcgtgcgatatatacatctgggcacctcttgccggcacctgcggagtgctgcttctctcactcgttattacgctgtactgctaa

SEQ ID NO: 148 - DNA, 2175 bp, synthetic construct
  misc_feature 1..2175: note = NK77.12_CD70_DB02_A06 construct
  source 1..2175: mol_type = other DNA
atggccttaccagtgaccgccttgctcctgccgctggccttgctgctccacgccgccaggccggactacaaagacgatgacgataaaggcggtggtggctctggtggtggcggatcccaggtgcagctggtgcagtctggggctgaggtgaagaagcctggggcctcagtgaaggtttcctgcaaggcatctggatacaccttcaccgggtactatatgcactgggtgcgacaggcccctggacaagggcttgagtggatgggatggatcaacccaaatagtggtgatacagggtacgcacagaagttccagggcagagtcaccatgaccagggacacgtccacgagcacagtctacatggagctgagcagcctgagatctgaggacacggccgtgtattactgtgctagatccgtcaacgactacggtgattacgacggttactggggccaagggaccctggtcaccgtctcctcaggtggaggcggttcaggcggaggtggctctggcggtggcggatcggacatccagatgacccagtctccatcctccctgtctgcatctgtaggagacagagtcaccatcacttgccaggcgagtcaggacattagcaactatttaaattggtatcagcagaaaccagggaaagcccctaagctcctgatctacgatgcatccaatttggaaacaggggtcccatcaaggttcagtggaagtggatctgggacagattttactctgaccatcagcagcctgcagcctgaagattttgcaacatattactgtcaacagtcttacagtacgcctcctacgttcggccaagggaccaaggtggaaatcaaaaccacgacgccagcgccgcggccaccaacaccggcgcccaccatcgcgtcgcagcccctgtccctgcgcccagaggcgtgccggccagcggcggggggcgcagtgcacacgagggggctggacttcgcctgtgatatctacatctgggcgcccttggccgggacttgtggggtccttctcctgtcactggttatcaccctttactgccggagggaccagaggctgccccccgatgcccacaagccccctgggggaggcagtttccggacccccatccaagaggagcaggccgacgcccactccaccctggccaagatcagagtgaagttcagcaggagcgcagacgcccccgcgtaccagcagggccagaaccagctctataacgagctcaatctaggacgaagagaggagtacgatgttttggacaagagacgtggccgggaccctgagatggggggaaagccgagaaggaagaaccctcaggaaggcctgtacaatgaactgcagaaagataagatggcggaggcctacagtgagattgggatgaaaggcgagcgccggaggggcaaggggcacgatggcctttaccagggtctcagtacagccaccaaggacacctacgacgcccttcacatgcaggccctgccccctcgcggctctggcgagggaaggggttccctgcttacttgcggcgacgtcgaagagaatcccggtccgatggccctcccagtaactgccctccttttgcccctcgcactccttcttcatgccgctcgccccaactgggtcaacgtgattagcgatttgaagaaaatcgaggaccttatacagtctatgcatattgacgctacactgtatactgagagtgatgtacacccgtcctgtaaggtaacggccatgaaatgctttcttctggagctccaggtcatcagcttggagtctggggacgcaagcatccacgatacggttgaaaacctcatcatccttgcgaacaactctctctcatctaatggaaacgttacagagagtgggtgtaaggagtgcgaagagttggaagaaaaaaacatcaaagaatttcttcaatccttcgttcacatagtgcaaatgttcattaacacgtccactaccacacccgccccgaggccacctacgccggcaccgactatcgccagtcaacccctctctctgcgccccgaggcttgccggcctgcggctggtggggcggtccacacccggggcctggattttgcgtgcgatatatacatctgggcacctcttgccggcacctgcggagtgctgcttctctcactcgttattacgctgtactgctaa

SEQ ID NO: 149 - DNA, 2175 bp, synthetic construct
  misc_feature 1..2175: note = NK77.13_CD70_DB02_A07 construct
  source 1..2175: mol_type = other DNA
atggccttaccagtgaccgccttgctcctgccgctggccttgctgctccacgccgccaggccggactacaaagacgatgacgataaaggcggtggtggctctggtggtggcggatcccaggtgcagctggtgcagtctggggctgaggtgaagaagcctggggcctcagtgaaggtttcctgcaaggcatctggatacaccttcaccggatactatatgcactgggtgcgacaggcccctggacaagggcttgagtggatgggaataatcaaccctagtggtgggagcacaagctacgcacagaagttccagggcagagtcaccatgaccagggacacgtccacgagcacagtctacatggagctgagcagcctgagatctgaggacacggccgtgtattactgtgctagagattacggtgattatgacgcctcgtttgactactggggccaagggaccctggtcaccgtctcctcaggtggaggcggttcaggcggaggtggctctggcggtggcggatcggacatccagatgacccagtctccatcctccctgtctgcatctgtaggagacagagtcaccatcacttgccgggcaagtcagagcattgacaattggttagcgtggtatcagcagaaaccagggaaagcccctaagctcctgatctatgctgcatccacattgcaaagtggggtcccatcaaggttcagtggcagtggatctgggacagatttcactctcaccatcagcagtctgcaacctgaagattttgcaacttactactgtcaacagagttacgatagtcctcccacttttggccaggggaccaagctggagatcaaaaccacgacgccagcgccgcggccaccaacaccggcgcccaccatcgcgtcgcagcccctgtccctgcgcccagaggcgtgccggccagcggcggggggcgcagtgcacacgagggggctggacttcgcctgtgatatctacatctgggcgcccttggccgggacttgtggggtccttctcctgtcactggttatcaccctttactgccggagggaccagaggctgccccccgatgcccacaagccccctgggggaggcagtttccggacccccatccaagaggagcaggccgacgcccactccaccctggccaagatcagagtgaagttcagcaggagcgcagacgcccccgcgtaccagcagggccagaaccagctctataacgagctcaatctaggacgaagagaggagtacgatgttttggacaagagacgtggccgggaccctgagatggggggaaagccgagaaggaagaaccctcaggaaggcctgtacaatgaactgcagaaagataagatggcggaggcctacagtgagattgggatgaaaggcgagcgccggaggggcaaggggcacgatggcctttaccagggtctcagtacagccaccaaggacacctacgacgcccttcacatgcaggccctgccccctcgcggctctggcgagggaaggggttccctgcttacttgcggcgacgtcgaagagaatcccggtccgatggccctcccagtaactgccctccttttgcccctcgcactccttcttcatgccgctcgccccaactgggtcaacgtgattagcgatttgaagaaaatcgaggaccttatacagtctatgcatattgacgctacactgtatactgagagtgatgtacacccgtcctgtaaggtaacggccatgaaatgctttcttctggagctccaggtcatcagcttggagtctggggacgcaagcatccacgatacggttgaaaacctcatcatccttgcgaacaactctctctcatctaatggaaacgttacagagagtgggtgtaaggagtgcgaagagttggaagaaaaaaacatcaaagaatttcttcaatccttcgttcacatagtgcaaatgttcattaacacgtccactaccacacccgccccgaggccacctacgccggcaccgactatcgccagtcaacccctctctctgcgccccgaggcttgccggcctgcggctggtggggcggtccacacccggggcctggattttgcgtgcgatatatacatctgggcacctcttgccggcacctgcggagtgctgcttctctcactcgttattacgctgtactgctaa

SEQ ID NO: 150 - DNA, 2166 bp, synthetic construct
  misc_feature 1..2166: note = NK77.14_CD70_DB02_A08 construct
  source 1..2166: mol_type = other DNA
atggccttaccagtgaccgccttgctcctgccgctggccttgctgctccacgccgccaggccggactacaaagacgatgacgataaaggcggtggtggctctggtggtggcggatcccaggtgcagctggtgcagtctggggctgaggtgaagaagcctggggcctcagtgaaggtttcctgcaaggcatctggatacaccttcaccagctacgatatcaattgggtgcgacaggcccctggacaagggcttgagtggatgggaataatcaacccctccgatggtagcacaatctacgcacagaacttccagggcagagtcaccatgaccagggacacgtccacgagcacagtctacatggagctgagcagcctgagatctgaggacacggccgtgtattactgtgtgaaggaagaggcctggtacttcgatctctggggccgtggcaccctggtcactgtctcctcaggtggaggcggttcaggcggaggtggctctggcggtggcggatcggacatccagatgacccagtctccatcctccctgtctgcatctgtaggagacagagtcaccatcacttgccaggcgagtcaggacattagcaactatttaaattggtatcagcagaaaccagggaaagcccctaagctcctgatctacgatgcatccaatttggaaacaggggtcccatcaaggttcagtggaagtggatctgggacagattttactttgaccatcagcagcctgcagcctgaagattttgcaacatattactgtcaacagtcctatagcacccctctcactttcggcggagggaccaaggtggagatcaaaaccacgacgccagcgccgcggccaccaacaccggcgcccaccatcgcgtcgcagcccctgtccctgcgcccagaggcgtgccggccagcggcggggggcgcagtgcacacgagggggctggacttcgcctgtgatatctacatctgggcgcccttggccgggacttgtggggtccttctcctgtcactggttatcaccctttactgccggagggaccagaggctgccccccgatgcccacaagccccctgggggaggcagtttccggacccccatccaagaggagcaggccgacgcccactccaccctggccaagatcagagtgaagttcagcaggagcgcagacgcccccgcgtaccagcagggccagaaccagctctataacgagctcaatctaggacgaagagaggagtacgatgttttggacaagagacgtggccgggaccctgagatggggggaaagccgagaaggaagaaccctcaggaaggcctgtacaatgaactgcagaaagataagatggcggaggcctacagtgagattgggatgaaaggcgagcgccggaggggcaaggggcacgatggcctttaccagggtctcagtacagccaccaaggacacctacgacgcccttcacatgcaggccctgccccctcgcggctctggcgagggaaggggttccctgcttacttgcggcgacgtcgaagagaatcccggtccgatggccctcccagtaactgccctccttttgcccctcgcactccttcttcatgccgctcgccccaactgggtcaacgtgattagcgatttgaagaaaatcgaggaccttatacagtctatgcatattgacgctacactgtatactgagagtgatgtacacccgtcctgtaaggtaacggccatgaaatgctttcttctggagctccaggtcatcagcttggagtctggggacgcaagcatccacgatacggttgaaaacctcatcatccttgcgaacaactctctctcatctaatggaaacgttacagagagtgggtgtaaggagtgcgaagagttggaagaaaaaaacatcaaagaatttcttcaatccttcgttcacatagtgcaaatgttcattaacacgtccactaccacacccgccccgaggccacctacgccggcaccgactatcgccagtcaacccctctctctgcgccccgaggcttgccggcctgcggctggtggggcggtccacacccggggcctggattttgcgtgcgatatatacatctgggcacctcttgccggcacctgcggagtgctgcttctctcactcgttattacgctgtactgctaa

SEQ ID NO: 151 - DNA, 2166 bp, synthetic construct
  misc_feature 1..2166: note = NK77.15_CD70_DB02_A09 construct
  source 1..2166: mol_type = other DNA
atggccttaccagtgaccgccttgctcctgccgctggccttgctgctccacgccgccaggccggactacaaagacgatgacgataaaggcggtggtggctctggtggtggcggatcccaggtgcagctggtgcagtctggggctgaggtgaagaagcctggggcctcagtgaaggtttcctgcaaggcatctggatacaccttcaccagctactatatgcactgggtgcgacaggcccctggacaagggcttgagtggatgggatggatgaaccctgataacggtgatacagggtacgcacagatgttccagggcagagtcaccatgaccagggacacgtccacgagcacagtctacatggagctgagcagcctgagatctgaggacacggccgtgtattactgtgcttcaggggattactatgacatcttgtactggggccaagggaccctggtcaccgtctcctcaggtggaggcggttcaggcggaggtggctctggcggtggcggatcggacatccagatgacccagtctccatcctccctgtctgcatctgtaggagacagagtcaccatcacttgccaggcgagtcaggacattagcaactatttaaattggtatcagcagaaaccagggaaagcccctaagctcctgatctacgatgtgtccaatttggaaacaggggtcccatcaaggttcagtggaagtggatctgggacagattttactctcaccatcagcagcctgcagcctgaagattttgcaacatattactgtcaacaggctaattccttccctctcactttcggcggagggaccaaggtggagatcaaaaccacgacgccagcgccgcggccaccaacaccggcgcccaccatcgcgtcgcagcccctgtccctgcgcccagaggcgtgccggccagcggcggggggcgcagtgcacacgagggggctggacttcgcctgtgatatctacatctgggcgcccttggccgggacttgtggggtccttctcctgtcactggttatcaccctttactgccggagggaccagaggctgccccccgatgcccacaagccccctgggggaggcagtttccggacccccatccaagaggagcaggccgacgcccactccaccctggccaagatcagagtgaagttcagcaggagcgcagacgcccccgcgtaccagcagggccagaaccagctctataacgagctcaatctaggacgaagagaggagtacgatgttttggacaagagacgtggccgggaccctgagatggggggaaagccgagaaggaagaaccctcaggaaggcctgtacaatgaactgcagaaagataagatggcggaggcctacagtgagattgggatgaaaggcgagcgccggaggggcaaggggcacgatggcctttaccagggtctcagtacagccaccaaggacacctacgacgcccttcacatgcaggccctgccccctcgcggctctggcgagggaaggggttccctgcttacttgcggcgacgtcgaagagaatcccggtccgatggccctcccagtaactgccctccttttgcccctcgcactccttcttcatgccgctcgccccaactgggtcaacgtgattagcgatttgaagaaaatcgaggaccttatacagtctatgcatattgacgctacactgtatactgagagtgatgtacacccgtcctgtaaggtaacggccatgaaatgctttcttctggagctccaggtcatcagcttggagtctggggacgcaagcatccacgatacggttgaaaacctcatcatccttgcgaacaactctctctcatctaatggaaacgttacagagagtgggtgtaaggagtgcgaagagttggaagaaaaaaacatcaaagaatttcttcaatccttcgttcacatagtgcaaatgttcattaacacgtccactaccacacccgccccgaggccacctacgccggcaccgactatcgccagtcaacccctctctctgcgccccgaggcttgccggcctgcggctggtggggcggtccacacccggggcctggattttgcgtgcgatatatacatctgggcacctcttgccggcacctgcggagtgctgcttctctcactcgttattacgctgtactgctaa

SEQ ID NO: 152 - DNA, 2169 bp, synthetic construct
  misc_feature 1..2169: note = NK77.16_CD70_DB02_A11 construct
  source 1..2169: mol_type = other DNA
atggccttaccagtgaccgccttgctcctgccgctggccttgctgctccacgccgccaggccggactacaaagacgatgacgataaaggcggtggtggctctggtggtggcggatcccaggtgcagctggtgcagtctggggctgaggtgaagaagcctggggcctcagtgaaggtttcctgcaaggcatctggatacaccttcaccagctactatatgcactgggtgcgacaggcccctggacaagggcttgagtggatgggatggatgaaccccaacagtggtgatacaggatacgcacagaagttccagggcagagtcaccatgaccagggacacgtccacgagcacagtctacatggagctgagcagcctgagatctgaggacacggccgtgtattactgtgctagagggcccagcgggtacgaatttgactactggggccaagggaccctggtcaccgtctcctcaggtggaggcggttcaggcggaggtggctctggcggtggcggatcggacatccagatgacccagtctccatcctccctgtctgcatctgtaggagacagagtcaccatcacttgccgggcaagtcagaccattagcaattatttaaattggtatcagcagaaaccagggaaagcccctaagctcctgatctatgacgcatccagtttggaaagtggggtcccatcaaggttcagtggcagtggatctgggacagatttcactctcaccatcagcagtctgcaacctgaagattttgcaacttactactgtcaacaggcaatcagttttcctctcactttcggcggagggaccaaggtggagatcaaaaccacgacgccagcgccgcggccaccaacaccggcgcccaccatcgcgtcgcagcccctgtccctgcgcccagaggcgtgccggccagcggcggggggcgcagtgcacacgagggggctggacttcgcctgtgatatctacatctgggcgcccttggccgggacttgtggggtccttctcctgtcactggttatcaccctttactgccggagggaccagaggctgccccccgatgcccacaagccccctgggggaggcagtttccggacccccatccaagaggagcaggccgacgcccactccaccctggccaagatcagagtgaagttcagcaggagcgcagacgcccccgcgtaccagcagggccagaaccagctctataacgagctcaatctaggacgaagagaggagtacgatgttttggacaagagacgtggccgggaccctgagatggggggaaagccgagaaggaagaaccctcaggaaggcctgtacaatgaactgcagaaagataagatggcggaggcctacagtgagattgggatgaaaggcgagcgccggaggggcaaggggcacgatggcctttaccagggtctcagtacagccaccaaggacacctacgacgcccttcacatgcaggccctgccccctcgcggctctggcgagggaaggggttccctgcttacttgcggcgacgtcgaagagaatcccggtccgatggccctcccagtaactgccctccttttgcccctcgcactccttcttcatgccgctcgccccaactgggtcaacgtgattagcgatttgaagaaaatcgaggaccttatacagtctatgcatattgacgctacactgtatactgagagtgatgtacacccgtcctgtaaggtaacggccatgaaatgctttcttctggagctccaggtcatcagcttggagtctggggacgcaagcatccacgatacggttgaaaacctcatcatccttgcgaacaactctctctcatctaatggaaacgttacagagagtgggtgtaaggagtgcgaagagttggaagaaaaaaacatcaaagaatttcttcaatccttcgttcacatagtgcaaatgttcattaacacgtccactaccacacccgccccgaggccacctacgccggcaccgactatcgccagtcaacccctctctctgcgccccgaggcttgccggcctgcggctggtggggcggtccacacccggggcctggattttgcgtgcgatatatacatctgggcacctcttgccggcacctgcggagtgctgcttctctcactcgttattacgctgtactgctaa

SEQ ID NO: 153 - DNA, 2181 bp, synthetic construct
  misc_feature 1..2181: note = NK77.17_CD70_DB02_B06 construct
  source 1..2181: mol_type = other DNA
atggccttaccagtgaccgccttgctcctgccgctggccttgctgctccacgccgccaggccggactacaaagacgatgacgataaaggcggtggtggctctggtggtggcggatcccaggtgcagctggtgcagtctggggctgaggtgaagaagcctggggcctcagtgaaggtttcctgcaaggcatctggatacaccttcaccgattactatatgcactgggtgcgacaggcccctggacaagggcttgagtggatgggaataatcaaccctaatagtggtggaacaaattacgcacagaagttccagggcagagtcaccatgaccagggacacgtccacgagcacagtctacatggagctgagcagcctgagatctgaggacacggccgtgtattactgtgctagagattttagtgtgtatgctgctgcagatggcatggatgtctggggccaagggacattggtcaccgtctcttcaggtggaggcggttcaggcggaggtggctctggcggtggcggatcggacatccagatgacccagtctccatcctccctgtctgcatctgtaggagacagagtcaccatcacttgccgggcaagtcagagcattagcagctatttaaattggtatcagcagaaaccagggaaagcccctaagctcctgatctatgacgcatccaatttggccaccggggtcccatcaaggttcagtggcagtggatctgggacagatttcactctcaccatcagcagtctgcaacctgaagattttgcaacttactactgtcaacagagtgatagttcacctctcactttcggccaagggaccaaggtggagatcaaaaccacgacgccagcgccgcggccaccaacaccggcgcccaccatcgcgtcgcagcccctgtccctgcgcccagaggcgtgccggccagcggcggggggcgcagtgcacacgagggggctggacttcgcctgtgatatctacatctgggcgcccttggccgggacttgtggggtccttctcctgtcactggttatcaccctttactgccggagggaccagaggctgccccccgatgcccacaagccccctgggggaggcagtttccggacccccatccaagaggagcaggccgacgcccactccaccctggccaagatcagagtgaagttcagcaggagcgcagacgcccccgcgtaccagcagggccagaaccagctctataacgagctcaatctaggacgaagagaggagtacgatgttttggacaagagacgtggccgggaccctgagatggggggaaagccgagaaggaagaaccctcaggaaggcctgtacaatgaactgcagaaagataagatggcggaggcctacagtgagattgggatgaaaggcgagcgccggaggggcaaggggcacgatggcctttaccagggtctcagtacagccaccaaggacacctacgacgcccttcacatgcaggccctgccccctcgcggctctggcgagggaaggggttccctgcttacttgcggcgacgtcgaagagaatcccggtccgatggccctcccagtaactgccctccttttgcccctcgcactccttcttcatgccgctcgccccaactgggtcaacgtgattagcgatttgaagaaaatcgaggaccttatacagtctatgcatattgacgctacactgtatactgagagtgatgtacacccgtcctgtaaggtaacggccatgaaatgctttcttctggagctccaggtcatcagcttggagtctggggacgcaagcatccacgatacggttgaaaacctcatcatccttgcgaacaactctctctcatctaatggaaacgttacagagagtgggtgtaaggagtgcgaagagttggaagaaaaaaacatcaaagaatttcttcaatccttcgttcacatagtgcaaatgttcattaacacgtccactaccacacccgccccgaggccacctacgccggcaccgactatcgccagtcaacccctctctctgcgccccgaggcttgccggcctgcggctggtggggcggtccacacccggggcctggattttgcgtgcgatatatacatctgggcacctcttgccggcacctgcggagtgctgcttctctcactcgttattacgctgtactgctaa

SEQ ID NO: 154 - DNA, 2178 bp, synthetic construct
  misc_feature 1..2178: note = NK77.18_CD70_DB02_B09 construct
  source 1..2178: mol_type = other DNA
atggccttaccagtgaccgccttgctcctgccgctggccttgctgctccacgccgccaggccggactacaaagacgatgacgataaaggcggtggtggctctggtggtggcggatcccaggtgcagctggtgcagtctggggctgaggtgaagaagcctggggcctcagtgaaggtttcctgcaaggcatctggatacaccttcaccgggtactatatgcactgggtgcgacaggcccctggacaagggcttgagtggatgggaataatcaaccctggggatggcggtacaatctacgcacagaatttccagggcagagtcaccatgaccagggacacgtccacgagcacagtctacatggagctgagcagcctgagatctgaggacacggccgtgtattactgtgctagaggattcggcgagtcagcccccgatgcttttgatatctggggccaagggacaatggtcaccgtctcttcaggtggaggcggttcaggcggaggtggctctggcggtggcggatcggacatccagatgacccagtctccatcctccctgtctgcatctgtaggagacagagtcaccatcacttgccaggcaagtcaggacattagcaattatttaaattggtatcagcagaaaccagggaaagcccctaagctcctgatctatggtgcaacgacattgcaaagtggggtcccatcaaggttcagtggcagtggatctgggacagatttcactctcaccatcagcagtctgcaacctgaagattttgcaacttactactgtcaacaggcggatagttttccttacacttttggccaggggaccaagctggagatcaaaaccacgacgccagcgccgcggccaccaacaccggcgcccaccatcgcgtcgcagcccctgtccctgcgcccagaggcgtgccggccagcggcggggggcgcagtgcacacgagggggctggacttcgcctgtgatatctacatctgggcgcccttggccgggacttgtggggtccttctcctgtcactggttatcaccctttactgccggagggaccagaggctgccccccgatgcccacaagccccctgggggaggcagtttccggacccccatccaagaggagcaggccgacgcccactccaccctggccaagatcagagtgaagttcagcaggagcgcagacgcccccgcgtaccagcagggccagaaccagctctataacgagctcaatctaggacgaagagaggagtacgatgttttggacaagagacgtggccgggaccctgagatggggggaaagccgagaaggaagaaccctcaggaaggcctgtacaatgaactgcagaaagataagatggcggaggcctacagtgagattgggatgaaaggcgagcgccggaggggcaaggggcacgatggcctttaccagggtctcagtacagccaccaaggacacctacgacgcccttcacatgcaggccctgccccctcgcggctctggcgagggaaggggttccctgcttacttgcggcgacgtcgaagagaatcccggtccgatggccctcccagtaactgccctccttttgcccctcgcactccttcttcatgccgctcgccccaactgggtcaacgtgattagcgatttgaagaaaatcgaggaccttatacagtctatgcatattgacgctacactgtatactgagagtgatgtacacccgtcctgtaaggtaacggccatgaaatgctttcttctggagctccaggtcatcagcttggagtctggggacgcaagcatccacgatacggttgaaaacctcatcatccttgcgaacaactctctctcatctaatggaaacgttacagagagtgggtgtaaggagtgcgaagagttggaagaaaaaaacatcaaagaatttcttcaatccttcgttcacatagtgcaaatgttcattaacacgtccactaccacacccgccccgaggccacctacgccggcaccgactatcgccagtcaacccctctctctgcgccccgaggcttgccggcctgcggctggtggggcggtccacacccggggcctggattttgcgtgcgatatatacatctgggcacctcttgccggcacctgcggagtgctgcttctctcactcgttattacgctgtactgctaa

SEQ ID NO: 155 - DNA, 2169 bp, synthetic construct
  misc_feature 1..2169: note = NK77.19_CD70_DB02_C03 construct
  source 1..2169: mol_type = other DNA
atggccttaccagtgaccgccttgctcctgccgctggccttgctgctccacgccgccaggccggactacaaagacgatgacgataaaggcggtggtggctctggtggtggcggatcccaggtgcagctggtgcagtctggggctgaggtgaagaagcctggggcctcagtgaaggtttcctgcaaggcatctggatacaccttcaccggttactatatgcactgggtgcgacaggcccctggacaagggcttgagtggatgggaataatcaaccctagtggtgggagcacaagctacgcacagaagttccagggcagagtcaccatgaccagggacacgtccacgagcacagtctacatggagctgagcagcctgagatctgaggacacggccgtgtattactgtgctgccgggacagagatctactacatggacgtctggggcaaagggaccacggtcaccgtctcctcaggtggaggcggttcaggcggaggtggctctggcggtggcggatcggacatccagatgacccagtctccatcctccctgtctgcatctgtaggagacagagtcaccatcacttgcagggcgagtcagactattgacatctatttaaattggtatcagcagaaaccagggaaagcccctaagctcctgatctacgatgcatccaatttggaaacaggggtcccatcaaggttcagtggaagtggatctgggacagattttactttgaccatcagcagcctgcagcctgaagattttgcaacatattactgtcaacaggcagattccttccctctcactttcggcggagggaccaaggtggagatcaaaaccacgacgccagcgccgcggccaccaacaccggcgcccaccatcgcgtcgcagcccctgtccctgcgcccagaggcgtgccggccagcggcggggggcgcagtgcacacgagggggctggacttcgcctgtgatatctacatctgggcgcccttggccgggacttgtggggtccttctcctgtcactggttatcaccctttactgccggagggaccagaggctgccccccgatgcccacaagccccctgggggaggcagtttccggacccccatccaagaggagcaggccgacgcccactccaccctggccaagatcagagtgaagttcagcaggagcgcagacgcccccgcgtaccagcagggccagaaccagctctataacgagctcaatctaggacgaagagaggagtacgatgttttggacaagagacgtggccgggaccctgagatggggggaaagccgagaaggaagaaccctcaggaaggcctgtacaatgaactgcagaaagataagatggcggaggcctacagtgagattgggatgaaaggcgagcgccggaggggcaaggggcacgatggcctttaccagggtctcagtacagccaccaaggacacctacgacgcccttcacatgcaggccctgccccctcgcggctctggcgagggaaggggttccctgcttacttgcggcgacgtcgaagagaatcccggtccgatggccctcccagtaactgccctccttttgcccctcgcactccttcttcatgccgctcgccccaactgggtcaacgtgattagcgatttgaagaaaatcgaggaccttatacagtctatgcatattgacgctacactgtatactgagagtgatgtacacccgtcctgtaaggtaacggccatgaaatgctttcttctggagctccaggtcatcagcttggagtctggggacgcaagcatccacgatacggttgaaaacctcatcatccttgcgaacaactctctctcatctaatggaaacgttacagagagtgggtgtaaggagtgcgaagagttggaagaaaaaaacatcaaagaatttcttcaatccttcgttcacatagtgcaaatgttcattaacacgtccactaccacacccgccccgaggccacctacgccggcaccgactatcgccagtcaacccctctctctgcgccccgaggcttgccggcctgcggctggtggggcggtccacacccggggcctggattttgcgtgcgatatatacatctgggcacctcttgccggcacctgcggagtgctgcttctctcactcgttattacgctgtactgctaa

SEQ ID NO: 156 - DNA, 2196 bp, synthetic construct
  misc_feature 1..2196: note = NK77.20_CD70_DB02_C04 construct
  source 1..2196: mol_type = other DNA
atggccttaccagtgaccgccttgctcctgccgctggccttgctgctccacgccgccaggccggactacaaagacgatgacgataaaggcggtggtggctctggtggtggcggatcccaagtgcagttagttcagtcaggcgccgaagttaaaaaacccggagcgagcgtaaaagtgtcttgtaaagccagtggcggcacatttagctcttatgcgatatcatgggttcgccaagcaccaggccagggcctggaatggatggggatgataaatccaagtgatggcgccactacttacgcacagaagttccagggcagagtcaccatgaccagggacacgtccacgagcacagtctacatggagctgagcagcctgagatctgaggacacggccgtgtattactgtgctagagagagggagctactacatttcgccacaaattattactactatggtatggacgtgtggggccaagggaccaccgtcaccgtctcctcaggtggaggcggttcaggcggaggtggctctggcggtggcggatcggacatccagatgacccagtctccatcttctctgtctgcatctgtaggagacagagtcaccatcacttgtcgggcgagtcagggtattagcaacaacttaaattggtatcagcagaaaccagggaaagcccctaagctcctgatctatgctgcatccagtttgcacagtggggtcccatcaaggttcagcggcagtggatctgggacagatttcactctcactatcagcagcctgcagcctgaagattttgcaacttactattgtcaacaggctgatgctttccctctcactttcggcggagggaccaaggtggagatcaaaaccacgacgccagcgccgcggccaccaacaccggcgcccaccatcgcgtcgcagcccctgtccctgcgcccagaggcgtgccggccagcggcggggggcgcagtgcacacgagggggctggacttcgcctgtgatatctacatctgggcgcccttggccgggacttgtggggtccttctcctgtcactggttatcaccctttactgccggagggaccagaggctgccccccgatgcccacaagccccctgggggaggcagtttccggacccccatccaagaggagcaggccgacgcccactccaccctggccaagatcagagtgaagttcagcaggagcgcagacgcccccgcgtaccagcagggccagaaccagctctataacgagctcaatctaggacgaagagaggagtacgatgttttggacaagagacgtggccgggaccctgagatggggggaaagccgagaaggaagaaccctcaggaaggcctgtacaatgaactgcagaaagataagatggcggaggcctacagtgagattgggatgaaaggcgagcgccggaggggcaaggggcacgatggcctttaccagggtctcagtacagccaccaaggacacctacgacgcccttcacatgcaggccctgccccctcgcggctctggcgagggaaggggttccctgcttacttgcggcgacgtcgaagagaatcccggtccgatggccctcccagtaactgccctccttttgcccctcgcactccttcttcatgccgctcgccccaactgggtcaacgtgattagcgatttgaagaaaatcgaggaccttatacagtctatgcatattgacgctacactgtatactgagagtgatgtacacccgtcctgtaaggtaacggccatgaaatgctttcttctggagctccaggtcatcagcttggagtctggggacgcaagcatccacgatacggttgaaaacctcatcatccttgcgaacaactctctctcatctaatggaaacgttacagagagtgggtgtaaggagtgcgaagagttggaagaaaaaaacatcaaagaatttcttcaatccttcgttcacatagtgcaaatgttcattaacacgtccactaccacacccgccccgaggccacctacgccggcaccgactatcgccagtcaacccctctctctgcgccccgaggcttgccggcctgcggctggtggggcggtccacacccggggcctggattttgcgtgcgatatatacatctgggcacctcttgccggcacctgcggagtgctgcttctctcactcgttattacgctgtactgctaa

SEQ ID NO: 157 - DNA, 2184 bp, synthetic construct
  misc_feature 1..2184: note = NK77.22_CD70_DB02_C07 construct
  source 1..2184: mol_type = other DNA
atggccttaccagtgaccgccttgctcctgccgctggccttgctgctccacgccgccaggccggactacaaagacgatgacgataaaggcggtggtggctctggtggtggcggatcccaggtgcagctggtgcagtctggggctgaggtgaagaagcctggggcctcagtgaaggtttcctgcaaggcatctggatacaccttcacccggaactatatgcactgggtgcgacaggcccctggacaagggcttgagtggatgggatggatctctcctgacaatggtgttacaaattacgcacagaatttccagggcagagtcaccatgaccagggacacgtccacgagcacagtctacatggagctgagcagcctgagatctgaggacacggccgtgtattactgtgctaagacacaaggctcatccagctggtatcagtggtacttcgatctctggggccgtggcaccctggtcactgtctcctcaggtggaggcggttcaggcggaggtggctctggcggtggcggatcggacatccagatgacccagtctccatcctccctgtctgcatctgtaggagacagagtcaccatcacttgccgggcaagtcagagcattggaacctggttagcctggtatcagcagaaaccagggaaagcccctaagctcctgatctatgctgcatccagtttgcaaagtggggtcccatcaaggttcagtggcagtggatctgggacagatttcactctcaccatcagcagtctgcaacctgaagattttgcaacttactactgtcaacagagttacaccacccctattacgttcggccaagggaccaaggtggaaatcaaaaccacgacgccagcgccgcggccaccaacaccggcgcccaccatcgcgtcgcagcccctgtccctgcgcccagaggcgtgccggccagcggcggggggcgcagtgcacacgagggggctggacttcgcctgtgatatctacatctgggcgcccttggccgggacttgtggggtccttctcctgtcactggttatcaccctttactgccggagggaccagaggctgccccccgatgcccacaagccccctgggggaggcagtttccggacccccatccaagaggagcaggccgacgcccactccaccctggccaagatcagagtgaagttcagcaggagcgcagacgcccccgcgtaccagcagggccagaaccagctctataacgagctcaatctaggacgaagagaggagtacgatgttttggacaagagacgtggccgggaccctgagatggggggaaagccgagaaggaagaaccctcaggaaggcctgtacaatgaactgcagaaagataagatggcggaggcctacagtgagattgggatgaaaggcgagcgccggaggggcaaggggcacgatggcctttaccagggtctcagtacagccaccaaggacacctacgacgcccttcacatgcaggccctgccccctcgcggctctggcgagggaaggggttccctgcttacttgcggcgacgtcgaagagaatcccggtccgatggccctcccagtaactgccctccttttgcccctcgcactccttcttcatgccgctcgccccaactgggtcaacgtgattagcgatttgaagaaaatcgaggaccttatacagtctatgcatattgacgctacactgtatactgagagtgatgtacacccgtcctgtaaggtaacggccatgaaatgctttcttctggagctccaggtcatcagcttggagtctggggacgcaagcatccacgatacggttgaaaacctcatcatccttgcgaacaactctctctcatctaatggaaacgttacagagagtgggtgtaaggagtgcgaagagttggaagaaaaaaacatcaaagaatttcttcaatccttcgttcacatagtgcaaatgttcattaacacgtccactaccacacccgccccgaggccacctacgccggcaccgactatcgccagtcaacccctctctctgcgccccgaggcttgccggcctgcggctggtggggcggtccacacccggggcctggattttgcgtgcgatatatacatctgggcacctcttgccggcacctgcggagtgctgcttctctcactcgttattacgctgtactgctaa

SEQ ID NO: 158 - DNA, 2172 bp, synthetic construct
  misc_feature 1..2172: note = NK77.24_CD70_DB02_D02 construct
  source 1..2172: mol_type = other DNA
atggccttaccagtgaccgccttgctcctgccgctggccttgctgctccacgccgccaggccggactacaaagacgatgacgataaaggcggtggtggctctggtggtggcggatcccaggtgcagctggtgcagtctggggctgaggtgaagaagcctggggcctcagtgaaggtttcctgcaaggcatctggatacaccttcaccagctactatatgcactgggtgcgacaggcccctggacaagggcttgagtggatgggaataatcgatccagggagtggtgacacaagctacgcacagaagttccagggcagagtcaccatgaccagggacacgtccacgagcacagtctacatggagctgagcagcctgagatctgaggacacggccgtgtattactgtgctagagggtccaactggtacgactactttgactactggggccaagggaccctggtcaccgtctcctcaggtggaggcggttcaggcggaggtggctctggcggtggcggatcggaaatagtgatgacgcagtctccagccaccctgtctgtgtctccaggggaaagagccaccctctcctgcagggccagtcagagtgttagcagctacttagcctggtaccagcagaaacctggccaggctcccaggctcctcatctatggtgcatccaccagggccactggtatcccagccaggttcagtggcagtgggtctgggacagagttcactctcaccatcagcagcctgcagtctgaagattttgcagtttattactgtcagcagtatgatagctatcctccaactttcggcggagggaccaaggtggagatcaaaaccacgacgccagcgccgcggccaccaacaccggcgcccaccatcgcgtcgcagcccctgtccctgcgcccagaggcgtgccggccagcggcggggggcgcagtgcacacgagggggctggacttcgcctgtgatatctacatctgggcgcccttggccgggacttgtggggtccttctcctgtcactggttatcaccctttactgccggagggaccagaggctgccccccgatgcccacaagccccctgggggaggcagtttccggacccccatccaagaggagcaggccgacgcccactccaccctggccaagatcagagtgaagttcagcaggagcgcagacgcccccgcgtaccagcagggccagaaccagctctataacgagctcaatctaggacgaagagaggagtacgatgttttggacaagagacgtggccgggaccctgagatggggggaaagccgagaaggaagaaccctcaggaaggcctgtacaatgaactgcagaaagataagatggcggaggcctacagtgagattgggatgaaaggcgagcgccggaggggcaaggggcacgatggcctttaccagggtctcagtacagccaccaaggacacctacgacgcccttcacatgcaggccctgccccctcgcggctctggcgagggaaggggttccctgcttacttgcggcgacgtcgaagagaatcccggtccgatggccctcccagtaactgccctccttttgcccctcgcactccttcttcatgccgctcgccccaactgggtcaacgtgattagcgatttgaagaaaatcgaggaccttatacagtctatgcatattgacgctacactgtatactgagagtgatgtacacccgtcctgtaaggtaacggccatgaaatgctttcttctggagctccaggtcatcagcttggagtctggggacgcaagcatccacgatacggttgaaaacctcatcatccttgcgaacaactctctctcatctaatggaaacgttacagagagtgggtgtaaggagtgcgaagagttggaagaaaaaaacatcaaagaatttcttcaatccttcgttcacatagtgcaaatgttcattaacacgtccactaccacacccgccccgaggccacctacgccggcaccgactatcgccagtcaacccctctctctgcgccccgaggcttgccggcctgcggctggtggggcggtccacacccggggcctggattttgcgtgcgatatatacatctgggcacctcttgccggcacctgcggagtgctgcttctctcactcgttattacgctgtactgctaa

SEQ ID NO: 159 - DNA, 2172 bp, synthetic construct
  misc_feature 1..2172: note = NK77.25_CD70_DB02_D04 construct
  source 1..2172: mol_type = other DNA
atggccttaccagtgaccgccttgctcctgccgctggccttgctgctccacgccgccaggccggactacaaagacgatgacgataaaggcggtggtggctctggtggtggcggatcccaggtgcagctggtgcagtctggggctgaggtgaagaagcctggggcctcagtgaaggtttcctgcaaggcatctggataccgcctgagcgaccattatatgcactgggtgcgacaggcccctggacaagggcttgagtggatgggaataatcaaccctagtggtgggagcacaacatacgcacagaacttccagggcagagtcaccatgaccagggacacgtccacgagcacagtctacatggagctgagcagcctgagatctgaggacacggccgtgtattactgtgcttccagttactatggtgactacgtcttggtgaattggggccaagggaccctggtcaccgtctcctcaggtggaggcggttcaggcggaggtggctctggcggtggcggatcggacatccagatgacccagtctccatcctccctgtctgcatctgtaggagacagagtcaccatcacttgccaggcaagtcaggacattagcaattatttaaattggtatcagcagaaaccagggaaagcccctaagctcctgatctatgctgcatccaccttggaaagtggggtcccatcaaggttcagtggcagtggatctgggacagatttcactctcaccatcagcagtctgcaacctgaagattttgcaacttactactgtcttcaggattacgactaccctctgacttttggccaggggaccaagctggagatcaaaaccacgacgccagcgccgcggccaccaacaccggcgcccaccatcgcgtcgcagcccctgtccctgcgcccagaggcgtgccggccagcggcggggggcgcagtgcacacgagggggctggacttcgcctgtgatatctacatctgggcgcccttggccgggacttgtggggtccttctcctgtcactggttatcaccctttactgccggagggaccagaggctgccccccgatgcccacaagccccctgggggaggcagtttccggacccccatccaagaggagcaggccgacgcccactccaccctggccaagatcagagtgaagttcagcaggagcgcagacgcccccgcgtaccagcagggccagaaccagctctataacgagctcaatctaggacgaagagaggagtacgatgttttggacaagagacgtggccgggaccctgagatggggggaaagccgagaaggaagaaccctcaggaaggcctgtacaatgaactgcagaaagataagatggcggaggcctacagtgagattgggatgaaaggcgagcgccggaggggcaaggggcacgatggcctttaccagggtctcagtacagccaccaaggacacctacgacgcccttcacatgcaggccctgccccctcgcggctctggcgagggaaggggttccctgcttacttgcggcgacgtcgaagagaatcccggtccgatggccctcccagtaactgccctccttttgcccctcgcactccttcttcatgccgctcgccccaactgggtcaacgtgattagcgatttgaagaaaatcgaggaccttatacagtctatgcatattgacgctacactgtatactgagagtgatgtacacccgtcctgtaaggtaacggccatgaaatgctttcttctggagctccaggtcatcagcttggagtctggggacgcaagcatccacgatacggttgaaaacctcatcatccttgcgaacaactctctctcatctaatggaaacgttacagagagtgggtgtaaggagtgcgaagagttggaagaaaaaaacatcaaagaatttcttcaatccttcgttcacatagtgcaaatgttcattaacacgtccactaccacacccgccccgaggccacctacgccggcaccgactatcgccagtcaacccctctctctgcgccccgaggcttgccggcctgcggctggtggggcggtccacacccggggcctggattttgcgtgcgatatatacatctgggcacctcttgccggcacctgcggagtgctgcttctctcactcgttattacgctgtactgctaa

SEQ ID NO: 160 - DNA, 2175 bp, synthetic construct
  misc_feature 1..2175: note = NK77.26_CD70_DB02_D10 construct
  source 1..2175: mol_type = other DNA
atggccttaccagtgaccgccttgctcctgccgctggccttgctgctccacgccgccaggccggactacaaagacgatgacgataaaggcggtggtggctctggtggtggcggatcccaggtgcagctggtgcagtctggggctgaggtgaagaagcctggggcctcagtgaaggtttcctgcaaggcatctggatacaccttcaccgattactatgtccactgggtgcgacaggcccctggacaagggcttgagtggatgggatggatcaacccgaatactggtgggacaagcttcgcacagaatttccagggcagagtcaccatgaccagggacacgtccacgagcacagtctacatggagctgagcagcctgagatctgaggacacggccgtgtattactgtgctagagatctgggtcaatggttgggagagattgactactggggccaagggaccctggtcaccgtctcctcaggtggaggcggttcaggcggaggtggctctggcggtggcggatcggacatccagatgacccagtctccatcttctctctctgcatctgtaggagacagagtcaccatcacttgtcgggcgagtcagacaatttataagtggttagcctggtatcagcagaaaccagggaaagcccctaagctcctgatctatgacgcatccagtttggaaagtggggtcccatcaaggttcagcggcagtggatctgggacagatttcactctcactatcagcagcctgcagcctgaagattttgcaacttactattgtcaacaggctaacagtttccctttcactttcggccctgggaccaaagtggatatcaaaaccacgacgccagcgccgcggccaccaacaccggcgcccaccatcgcgtcgcagcccctgtccctgcgcccagaggcgtgccggccagcggcggggggcgcagtgcacacgagggggctggacttcgcctgtgatatctacatctgggcgcccttggccgggacttgtggggtccttctcctgtcactggttatcaccctttactgccggagggaccagaggctgccccccgatgcccacaagccccctgggggaggcagtttccggacccccatccaagaggagcaggccgacgcccactccaccctggccaagatcagagtgaagttcagcaggagcgcagacgcccccgcgtaccagcagggccagaaccagctctataacgagctcaatctaggacgaagagaggagtacgatgttttggacaagagacgtggccgggaccctgagatggggggaaagccgagaaggaagaaccctcaggaaggcctgtacaatgaactgcagaaagataagatggcggaggcctacagtgagattgggatgaaaggcgagcgccggaggggcaaggggcacgatggcctttaccagggtctcagtacagccaccaaggacacctacgacgcccttcacatgcaggccctgccccctcgcggctctggcgagggaaggggttccctgcttacttgcggcgacgtcgaagagaatcccggtccgatggccctcccagtaactgccctccttttgcccctcgcactccttcttcatgccgctcgccccaactgggtcaacgtgattagcgatttgaagaaaatcgaggaccttatacagtctatgcatattgacgctacactgtatactgagagtgatgtacacccgtcctgtaaggtaacggccatgaaatgctttcttctggagctccaggtcatcagcttggagtctggggacgcaagcatccacgatacggttgaaaacctcatcatccttgcgaacaactctctctcatctaatggaaacgttacagagagtgggtgtaaggagtgcgaagagttggaagaaaaaaacatcaaagaatttcttcaatccttcgttcacatagtgcaaatgttcattaacacgtccactaccacacccgccccgaggccacctacgccggcaccgactatcgccagtcaacccctctctctgcgccccgaggcttgccggcctgcggctggtggggcggtccacacccggggcctggattttgcgtgcgatatatacatctgggcacctcttgccggcacctgcggagtgctgcttctctcactcgttattacgctgtactgctaa

SEQ ID NO: 161 - DNA, 2187 bp, synthetic construct
  misc_feature 1..2187: note = NK77.27_CD70_DB02_D11 construct
  source 1..2187: mol_type = other DNA
atggccttaccagtgaccgccttgctcctgccgctggccttgctgctccacgccgccaggccggactacaaagacgatgacgataaaggcggtggtggctctggtggtggcggatcccaggtgcagctggtgcagtctggggctgaggtgaagaagcctggggcctcagtgaaggtttcctgcaaggcatctggatacaccttcaccgactacaccgattactttgtgcactgggtgcgacaggcccctggacaagggcttgagtggatgggaatattcaaccctagtgatggtagcacaagctacgcacaggaattccagggcagagtcaccatgaccagggacacgtccacgagcacagtctacatggagctgagcagcctgagatctgaggacacggccgtgtattactgtgctagaggaccttacagtagtagctggtattactttgactactggggccaagggaccctggtcaccgtctcctcaggtggaggcggttcaggcggaggtggctctggcggtggcggatcggacatccagatgacccagtctccatcctccctgtctgcatctgtaggagacagagtcaccatcacttgccaggcgagtcaggacattagcaactatttaaattggtatcagcagaaaccagggaaagcccctaagctcctgatctacgatgcatccaatttggaaacaggggtcccatcaaggttcagtggaagtggatctgggacagattttactctgaccatcagcagcctgcagcctgaagatttcgcaacatattactgtcaacaggcccactcgtttcctcccacgttcggccaagggaccaaggtggaaatcaaaaccacgacgccagcgccgcggccaccaacaccggcgcccaccatcgcgtcgcagcccctgtccctgcgcccagaggcgtgccggccagcggcggggggcgcagtgcacacgagggggctggacttcgcctgtgatatctacatctgggcgcccttggccgggacttgtggggtccttctcctgtcactggttatcaccctttactgccggagggaccagaggctgccccccgatgcccacaagccccctgggggaggcagtttccggacccccatccaagaggagcaggccgacgcccactccaccctggccaagatcagagtgaagttcagcaggagcgcagacgcccccgcgtaccagcagggccagaaccagctctataacgagctcaatctaggacgaagagaggagtacgatgttttggacaagagacgtggccgggaccctgagatggggggaaagccgagaaggaagaaccctcaggaaggcctgtacaatgaactgcagaaagataagatggcggaggcctacagtgagattgggatgaaaggcgagcgccggaggggcaaggggcacgatggcctttaccagggtctcagtacagccaccaaggacacctacgacgcccttcacatgcaggccctgccccctcgcggctctggcgagggaaggggttccctgcttacttgcggcgacgtcgaagagaatcccggtccgatggccctcccagtaactgccctccttttgcccctcgcactccttcttcatgccgctcgccccaactgggtcaacgtgattagcgatttgaagaaaatcgaggaccttatacagtctatgcatattgacgctacactgtatactgagagtgatgtacacccgtcctgtaaggtaacggccatgaaatgctttcttctggagctccaggtcatcagcttggagtctggggacgcaagcatccacgatacggttgaaaacctcatcatccttgcgaacaactctctctcatctaatggaaacgttacagagagtgggtgtaaggagtgcgaagagttggaagaaaaaaacatcaaagaatttcttcaatccttcgttcacatagtgcaaatgttcattaacacgtccactaccacacccgccccgaggccacctacgccggcaccgactatcgccagtcaacccctctctctgcgccccgaggcttgccggcctgcggctggtggggcggtccacacccggggcctggattttgcgtgcgatatatacatctgggcacctcttgccggcacctgcggagtgctgcttctctcactcgttattacgctgtactgctaa

SEQ ID NO: 162 - DNA, 2175 bp, synthetic construct
  misc_feature 1..2175: note = NK77.28_CD70_DB02_E04 construct
  source 1..2175: mol_type = other DNA
atggccttaccagtgaccgccttgctcctgccgctggccttgctgctccacgccgccaggccggactacaaagacgatgacgataaaggcggtggtggctctggtggtggcggatcccaggtgcagctggtgcagtctggggctgaggtgaagaagcctggggcctcagtgaaggtttcctgcaaggcatctggatacatcttcaccgattactatatgcactgggtgcgacaggcccctggacaagggcttgagtggatgggaataatcaaccctagtggtggagatacactttacgcacagaagttccagggcagagtcaccatgaccagggacacgtccacgagcacagtctacatggagctgagcagcctgagatctgaggacacggccgtgtattactgtgctagagaaggcgtaggagctatgggcgtgtttgactactggggccaagggaccctggtcaccgtctcctcaggtggaggcggttcaggcggaggtggctctggcggtggcggatcggacatccagatgacccagtctccatcctccctgtctgcatctgtaggagacagagtcaccatcacttgccgggcaagtaccagcattagcgattatgtgcattggtatcagcagaaaccagggaaagcccctaagctcctgatctatgatgcatccagtttgcaaagtggggtcccatcaaggttcagtggcagtggatctgggacagatttcactctcaccatcagcagtctgcaacctgaagattttgcaacttactactgtcaacagagtgatagtacccctcccactttcggcggagggaccaaggtggagatcaaaaccacgacgccagcgccgcggccaccaacaccggcgcccaccatcgcgtcgcagcccctgtccctgcgcccagaggcgtgccggccagcggcggggggcgcagtgcacacgagggggctggacttcgcctgtgatatctacatctgggcgcccttggccgggacttgtggggtccttctcctgtcactggttatcaccctttactgccggagggaccagaggctgccccccgatgcccacaagccccctgggggaggcagtttccggacccccatccaagaggagcaggccgacgcccactccaccctggccaagatcagagtgaagttcagcaggagcgcagacgcccccgcgtaccagcagggccagaaccagctctataacgagctcaatctaggacgaagagaggagtacgatgttttggacaagagacgtggccgggaccctgagatggggggaaagccgagaaggaagaaccctcaggaaggcctgtacaatgaactgcagaaagataagatggcggaggcctacagtgagattgggatgaaaggcgagcgccggaggggcaaggggcacgatggcctttaccagggtctcagtacagccaccaaggacacctacgacgcccttcacatgcaggccctgccccctcgcggctctggcgagggaaggggttccctgcttacttgcggcgacgtcgaagagaatcccggtccgatggccctcccagtaactgccctccttttgcccctcgcactccttcttcatgccgctcgccccaactgggtcaacgtgattagcgatttgaagaaaatcgaggaccttatacagtctatgcatattgacgctacactgtatactgagagtgatgtacacccgtcctgtaaggtaacggccatgaaatgctttcttctggagctccaggtcatcagcttggagtctggggacgcaagcatccacgatacggttgaaaacctcatcatccttgcgaacaactctctctcatctaatggaaacgttacagagagtgggtgtaaggagtgcgaagagttggaagaaaaaaacatcaaagaatttcttcaatccttcgttcacatagtgcaaatgttcattaacacgtccactaccacacccgccccgaggccacctacgccggcaccgactatcgccagtcaacccctctctctgcgccccgaggcttgccggcctgcggctggtggggcggtccacacccggggcctggattttgcgtgcgatatatacatctgggcacctcttgccggcacctgcggagtgctgcttctctcactcgttattacgctgtactgctaa

SEQ ID NO: 163 - DNA, 2181 bp, synthetic construct
  misc_feature 1..2181: note = NK77.29_CD70_DB02_F06 construct
  source 1..2181: mol_type = other DNA
atggccttaccagtgaccgccttgctcctgccgctggccttgctgctccacgccgccaggccggactacaaagacgatgacgataaaggcggtggtggctctggtggtggcggatcccaggtgcagctggtgcagtctggggctgaggtgaagaagcctggggcctcagtgaaggtttcctgcaaggcatctggatacaccttcaccgatcactatatccactgggtgcgacaggcccctggacaagggcttgagtggatgggatggatcagtgcgtacaatggtaaaacaaattacgcacagaagttccagggcagagtcaccatgaccagggacacgtccacgagcacagtctacatggagctgagcagcctgagatctgaggacacggccgtgtattactgtgctagagacacaatctactatgacttttggagtgggtacgactactggggccaagggaccctggtcaccgtctcctcaggtggaggcggttcaggcggaggtggctctggcggtggcggatcggacatccagatgacccagtctccatcctccctgtctgcatctgtaggagacagagtcaccatcacttgccgggcaagtcagggaattagcaataatttaaattggtatcagcagaaaccagggaaagcccctaagctcctgatctattacgcatccaccttgcaaagtggggtcccatcaaggttcagtggcagtggatctgggacagatttcactctcaccatcagcagtctgcaacctgaagattttgcaacttactactgtcaacagagttacagtacccctatcaccttcggccaagggacacgactggagattaaaaccacgacgccagcgccgcggccaccaacaccggcgcccaccatcgcgtcgcagcccctgtccctgcgcccagaggcgtgccggccagcggcggggggcgcagtgcacacgagggggctggacttcgcctgtgatatctacatctgggcgcccttggccgggacttgtggggtccttctcctgtcactggttatcaccctttactgccggagggaccagaggctgccccccgatgcccacaagccccctgggggaggcagtttccggacccccatccaagaggagcaggccgacgcccactccaccctggccaagatcagagtgaagttcagcaggagcgcagacgcccccgcgtaccagcagggccagaaccagctctataacgagctcaatctaggacgaagagaggagtacgatgttttggacaagagacgtggccgggaccctgagatggggggaaagccgagaaggaagaaccctcaggaaggcctgtacaatgaactgcagaaagataagatggcggaggcctacagtgagattgggatgaaaggcgagcgccggaggggcaaggggcacgatggcctttaccagggtctcagtacagccaccaaggacacctacgacgcccttcacatgcaggccctgccccctcgcggctctggcgagggaaggggttccctgcttacttgcggcgacgtcgaagagaatcccggtccgatggccctcccagtaactgccctccttttgcccctcgcactccttcttcatgccgctcgccccaactgggtcaacgtgattagcgatttgaagaaaatcgaggaccttatacagtctatgcatattgacgctacactgtatactgagagtgatgtacacccgtcctgtaaggtaacggccatgaaatgctttcttctggagctccaggtcatcagcttggagtctggggacgcaagcatccacgatacggttgaaaacctcatcatccttgcgaacaactctctctcatctaatggaaacgttacagagagtgggtgtaaggagtgcgaagagttggaagaaaaaaacatcaaagaatttcttcaatccttcgttcacatagtgcaaatgttcattaacacgtccactaccacacccgccccgaggccacctacgccggcaccgactatcgccagtcaacccctctctctgcgccccgaggcttgccggcctgcggctggtggggcggtccacacccggggcctggattttgcgtgcgatatatacatctgggcacctcttgccggcacctgcggagtgctgcttctctcactcgttattacgctgtactgctaa

SEQ ID NO: 164 - DNA, 2181 bp, synthetic construct
  misc_feature 1..2181: note = NK77.31_CD70_DB02_F08 construct
  source 1..2181: mol_type = other DNA
atggccttaccagtgaccgccttgctcctgccgctggccttgctgctccacgccgccaggccggactacaaagacgatgacgataaaggcggtggtggctctggtggtggcggatcccaggtgcagctggtgcagtctggggctgaggtgaagaagcctggggcctcagtgaaggtttcctgcaaggcatctggatacaccttcaccagctactatatgcactgggtgcgacaggcccctggacaagggcttgagtggatgggaataatcaaccctagtggtggcgcgacaatctacgcacagaagttccagggcagagtcaccatgaccagggacacgtccacgagcacagtctacatggagctgagcagcctgagatctgaggacacggccgtgtattactgtgctagatctcgcggtgactactatggaagcggggattttgactactggggccaagggaccctggtcaccgtctcctcaggtggaggcggttcaggcggaggtggctctggcggtggcggatcggacatccagatgacccagtctccatcctccctgtctgcatctgtaggagacagagtcaccatcacttgccgggcaagtcagacgattagcaattatttaaattggtatcagcagaaaccagggaaagcccctaagctcctgatctatgatgcatccacgttggaagccggggtcccatcaaggttcagtggcagtggatctgggacagatttcactctcaccatcagcagtctgcaacctgaagattttgcaacttactactgtcaacagagttacaaccctccatacacttttggccaggggaccaagctggagatcaaaaccacgacgccagcgccgcggccaccaacaccggcgcccaccatcgcgtcgcagcccctgtccctgcgcccagaggcgtgccggccagcggcggggggcgcagtgcacacgagggggctggacttcgcctgtgatatctacatctgggcgcccttggccgggacttgtggggtccttctcctgtcactggttatcaccctttactgccggagggaccagaggctgccccccgatgcccacaagccccctgggggaggcagtttccggacccccatccaagaggagcaggccgacgcccactccaccctggccaagatcagagtgaagttcagcaggagcgcagacgcccccgcgtaccagcagggccagaaccagctctataacgagctcaatctaggacgaagagaggagtacgatgttttggacaagagacgtggccgggaccctgagatggggggaaagccgagaaggaagaaccctcaggaaggcctgtacaatgaactgcagaaagataagatggcggaggcctacagtgagattgggatgaaaggcgagcgccggaggggcaaggggcacgatggcctttaccagggtctcagtacagccaccaaggacacctacgacgcccttcacatgcaggccctgccccctcgcggctctggcgagggaaggggttccctgcttacttgcggcgacgtcgaagagaatcccggtccgatggccctcccagtaactgccctccttttgcccctcgcactccttcttcatgccgctcgccccaactgggtcaacgtgattagcgatttgaagaaaatcgaggaccttatacagtctatgcatattgacgctacactgtatactgagagtgatgtacacccgtcctgtaaggtaacggccatgaaatgctttcttctggagctccaggtcatcagcttggagtctggggacgcaagcatccacgatacggttgaaaacctcatcatccttgcgaacaactctctctcatctaatggaaacgttacagagagtgggtgtaaggagtgcgaagagttggaagaaaaaaacatcaaagaatttcttcaatccttcgttcacatagtgcaaatgttcattaacacgtccactaccacacccgccccgaggccacctacgccggcaccgactatcgccagtcaacccctctctctgcgccccgaggcttgccggcctgcggctggtggggcggtccacacccggggcctggattttgcgtgcgatatatacatctgggcacctcttgccggcacctgcggagtgctgcttctctcactcgttattacgctgtactgctaa

SEQ ID NO: 165 - DNA, 2169 bp, synthetic construct
  misc_feature 1..2169: note = NK77.32_CD70_DB02_G07 construct
  source 1..2169: mol_type = other DNA
atggccttaccagtgaccgccttgctcctgccgctggccttgctgctccacgccgccaggccggactacaaagacgatgacgataaaggcggtggtggctctggtggtggcggatcccaggtgcagctggtgcagtctggggctgaggtgaagaagcctggggcctcagtgaaggtttcctgcaaggcatctggatacaccttcaccgattactatatgcactgggtgcgacaggcccctggacaagggcttgagtggatgggaataatcaaccctagtggtggaagcacaagctacgcacagaagttccagggcagagtcaccatgaccagggacacgtccacgagcacagtctacatggagctgagcagcctgagatctgaggacacggccgtgtattactgtgctagaggatattttgatcacgcattcgatatctggggccaagggacaatggtcaccgtctcttcaggtggaggcggttcaggcggaggtggctctggcggtggcggatcggacatccagatgacccagtctccatcctccctgtctgcatctgtaggagacagagtcaccatcacttgccgggcaagtcagagcattagcacttatttaaattggtatcagcagaaaccagggaaagcccctaagctcctgatctatgatgcatccaacttggagatcggggtcccatcaaggttcagtggcagtggatctgggacagatttcactctcaccatcagcagtctgcaacctgaagattttgcaacttactactgtcaacagagtgacagttcaccactcactttcggccaggggaccaaggtggagatcaaaaccacgacgccagcgccgcggccaccaacaccggcgcccaccatcgcgtcgcagcccctgtccctgcgcccagaggcgtgccggccagcggcggggggcgcagtgcacacgagggggctggacttcgcctgtgatatctacatctgggcgcccttggccgggacttgtggggtccttctcctgtcactggttatcaccctttactgccggagggaccagaggctgccccccgatgcccacaagccccctgggggaggcagtttccggacccccatccaagaggagcaggccgacgcccactccaccctggccaagatcagagtgaagttcagcaggagcgcagacgcccccgcgtaccagcagggccagaaccagctctataacgagctcaatctaggacgaagagaggagtacgatgttttggacaagagacgtggccgggaccctgagatggggggaaagccgagaaggaagaaccctcaggaaggcctgtacaatgaactgcagaaagataagatggcggaggcctacagtgagattgggatgaaaggcgagcgccggaggggcaaggggcacgatggcctttaccagggtctcagtacagccaccaaggacacctacgacgcccttcacatgcaggccctgccccctcgcggctctggcgagggaaggggttccctgcttacttgcggcgacgtcgaagagaatcccggtccgatggccctcccagtaactgccctccttttgcccctcgcactccttcttcatgccgctcgccccaactgggtcaacgtgattagcgatttgaagaaaatcgaggaccttatacagtctatgcatattgacgctacactgtatactgagagtgatgtacacccgtcctgtaaggtaacggccatgaaatgctttcttctggagctccaggtcatcagcttggagtctggggacgcaagcatccacgatacggttgaaaacctcatcatccttgcgaacaactctctctcatctaatggaaacgttacagagagtgggtgtaaggagtgcgaagagttggaagaaaaaaacatcaaagaatttcttcaatccttcgttcacatagtgcaaatgttcattaacacgtccactaccacacccgccccgaggccacctacgccggcaccgactatcgccagtcaacccctctctctgcgccccgaggcttgccggcctgcggctggtggggcggtccacacccggggcctggattttgcgtgcgatatatacatctgggcacctcttgccggcacctgcggagtgctgcttctctcactcgttattacgctgtactgctaa

SEQ ID NO: 166 - DNA, 2187 bp, synthetic construct
  misc_feature 1..2187: note = NK77.33_CD70_DB02_H04 construct
  source 1..2187: mol_type = other DNA
atggccttaccagtgaccgccttgctcctgccgctggccttgctgctccacgccgccaggccggactacaaagacgatgacgataaaggcggtggtggctctggtggtggcggatcccaggtgcagctggtgcagtctggggctgaggtgaagaagcctggggcctcagtgaaggtttcctgcaaggcatctggatacaccttcaccggttactatatgcactgggtgcgacaggcccctggacaagggcttgagtggatgggaataatcaaccctagtggtggggatacaatatacgcacagaagttccagggcagagtcaccatgaccagggacacgtccacgagcacagtctacatggagctgagcagcctgagatctgaggacacggccgtgtattactgtgctagaggtgactcgtcttcatggtacgactattactactacatggacgtctggggcaaagggaccacggtcaccgtctcctcaggtggaggcggttcaggcggaggtggctctggcggtggcggatcggacatccagatgacccagtctccatcctccctgtctgcatctgtaggagacagagtcaccatcacttgccaagcaagtcaggatattagcaactatttaaattggtatcagcagaaaccagggaaagcccctaagctcctgatctatgctgcatccagtttgcaaagtggggtcccatcaaggttcagtggcagtggatctgggacagatttcactctcaccatcagcagtctgcaacctgaagattttgcaacttactactgtcaacagagttaccggacccctctcactttcggcggagggaccaaggtggagatcaaaaccacgacgccagcgccgcggccaccaacaccggcgcccaccatcgcgtcgcagcccctgtccctgcgcccagaggcgtgccggccagcggcggggggcgcagtgcacacgagggggctggacttcgcctgtgatatctacatctgggcgcccttggccgggacttgtggggtccttctcctgtcactggttatcaccctttactgccggagggaccagaggctgccccccgatgcccacaagccccctgggggaggcagtttccggacccccatccaagaggagcaggccgacgcccactccaccctggccaagatcagagtgaagttcagcaggagcgcagacgcccccgcgtaccagcagggccagaaccagctctataacgagctcaatctaggacgaagagaggagtacgatgttttggacaagagacgtggccgggaccctgagatggggggaaagccgagaaggaagaaccctcaggaaggcctgtacaatgaactgcagaaagataagatggcggaggcctacagtgagattgggatgaaaggcgagcgccggaggggcaaggggcacgatggcctttaccagggtctcagtacagccaccaaggacacctacgacgcccttcacatgcaggccctgccccctcgcggctctggcgagggaaggggttccctgcttacttgcggcgacgtcgaagagaatcccggtccgatggccctcccagtaactgccctccttttgcccctcgcactccttcttcatgccgctcgccccaactgggtcaacgtgattagcgatttgaagaaaatcgaggaccttatacagtctatgcatattgacgctacactgtatactgagagtgatgtacacccgtcctgtaaggtaacggccatgaaatgctttcttctggagctccaggtcatcagcttggagtctggggacgcaagcatccacgatacggttgaaaacctcatcatccttgcgaacaactctctctcatctaatggaaacgttacagagagtgggtgtaaggagtgcgaagagttggaagaaaaaaacatcaaagaatttcttcaatccttcgttcacatagtgcaaatgttcattaacacgtccactaccacacccgccccgaggccacctacgccggcaccgactatcgccagtcaacccctctctctgcgccccgaggcttgccggcctgcggctggtggggcggtccacacccggggcctggattttgcgtgcgatatatacatctgggcacctcttgccggcacctgcggagtgctgcttctctcactcgttattacgctgtactgctaa

SEQ ID NO: 167 - DNA, 2172 bp, synthetic construct
  misc_feature 1..2172: note = NK77.34_CD70_DB02_H05 construct
  source 1..2172: mol_type = other DNA
atggccttaccagtgaccgccttgctcctgccgctggccttgctgctccacgccgccaggccggactacaaagacgatgacgataaaggcggtggtggctctggtggtggcggatcccaggtgcagctggtgcagtctggggctgaggtgaagaagcctggggcctcagtgaaggtttcctgcaaggcatctggatacaccttcaccgactactttacccactgggtgcgacaggcccctggacaagggcttgagtggatgggatggatcaacacatatgacggtaatacaaattacgcacagaagttccagggcagagtcaccatgaccagggacacgtccacgagcacagtctacatggagctgagcagcctgagatctgaggacacggccgtgtattactgtgctagagaaatggagtggctcggccaggtggactactggggccaagggaccctggtcaccgtctcctcaggtggaggcggttcaggcggaggtggctctggcggtggcggatcggacatccagatgacccagtctccatcctccctgtctgcatctgtaggagacagagtcaccatcacttgccgggcaagtcaggatattcgcaacgatttagggtggtatcagcagaaaccagggaaagcccctaagctcctgatctatgctgcatccaacttggagaccggggtcccatcaaggttcagtggcagtggatctgggacagatttcactctcaccatcagcagtctgcaacctgaagattttgcaacttactactgtcaacagagttacagtgcacctttcactttcggccctgggaccaaagtggatatcaaaaccacgacgccagcgccgcggccaccaacaccggcgcccaccatcgcgtcgcagcccctgtccctgcgcccagaggcgtgccggccagcggcggggggcgcagtgcacacgagggggctggacttcgcctgtgatatctacatctgggcgcccttggccgggacttgtggggtccttctcctgtcactggttatcaccctttactgccggagggaccagaggctgccccccgatgcccacaagccccctgggggaggcagtttccggacccccatccaagaggagcaggccgacgcccactccaccctggccaagatcagagtgaagttcagcaggagcgcagacgcccccgcgtaccagcagggccagaaccagctctataacgagctcaatctaggacgaagagaggagtacgatgttttggacaagagacgtggccgggaccctgagatggggggaaagccgagaaggaagaaccctcaggaaggcctgtacaatgaactgcagaaagataagatggcggaggcctacagtgagattgggatgaaaggcgagcgccggaggggcaaggggcacgatggcctttaccagggtctcagtacagccaccaaggacacctacgacgcccttcacatgcaggccctgccccctcgcggctctggcgagggaaggggttccctgcttacttgcggcgacgtcgaagagaatcccggtccgatggccctcccagtaactgccctccttttgcccctcgcactccttcttcatgccgctcgccccaactgggtcaacgtgattagcgatttgaagaaaatcgaggaccttatacagtctatgcatattgacgctacactgtatactgagagtgatgtacacccgtcctgtaaggtaacggccatgaaatgctttcttctggagctccaggtcatcagcttggagtctggggacgcaagcatccacgatacggttgaaaacctcatcatccttgcgaacaactctctctcatctaatggaaacgttacagagagtgggtgtaaggagtgcgaagagttggaagaaaaaaacatcaaagaatttcttcaatccttcgttcacatagtgcaaatgttcattaacacgtccactaccacacccgccccgaggccacctacgccggcaccgactatcgccagtcaacccctctctctgcgccccgaggcttgccggcctgcggctggtggggcggtccacacccggggcctggattttgcgtgcgatatatacatctgggcacctcttgccggcacctgcggagtgctgcttctctcactcgttattacgctgtactgctaa

SEQ ID NO: 168 - DNA, 2172 bp, synthetic construct
  misc_feature 1..2172: note = NK77.35_CD70_DB02_H08 construct
  source 1..2172: mol_type = other DNA
atggccttaccagtgaccgccttgctcctgccgctggccttgctgctccacgccgccaggccggactacaaagacgatgacgataaaggcggtggtggctctggtggtggcggatcccaggtgcagctggtgcagtctggggctgaggtgaagaagcctggggcctcagtgaaggtttcctgcaaggcatctggatacaccttcaccagctactatatacactgggtgcgacaggcccctggacaagggcttgagtggatgggacgaatcaaccctaatggtggagggacaaactacgcacagaagttccagggcagagtcaccatgaccagggacacgtccacgagcacagtctacatggagctgagcagcctgagatctgaggacacggccgtgtattactgtgctagaggccacagagggggtggcgggattgactactggggccaagggaccctggtcaccgtctcctcaggtggaggcggttcaggcggaggtggctctggcggtggcggatcggacatccagatgacccagtctccatcctccctgtctgcatctgtaggagacagagtcaccatcacttgccgggcaagtcaggagattagcaactatttagcctggtatcagcagaaaccagggaaagcccctaagctcctgatctatgatgcatccaacttgcaaactggggtcccatcaaggttcagtggcagtggatctgggacagatttcactctcaccatcagcagtctgcaacctgaagattttgcaacttactactgtcaacagagttacagtacccctttcactttcggccctgggaccaaagtggatatcaaaaccacgacgccagcgccgcggccaccaacaccggcgcccaccatcgcgtcgcagcccctgtccctgcgcccagaggcgtgccggccagcggcggggggcgcagtgcacacgagggggctggacttcgcctgtgatatctacatctgggcgcccttggccgggacttgtggggtccttctcctgtcactggttatcaccctttactgccggagggaccagaggctgccccccgatgcccacaagccccctgggggaggcagtttccggacccccatccaagaggagcaggccgacgcccactccaccctggccaagatcagagtgaagttcagcaggagcgcagacgcccccgcgtaccagcagggccagaaccagctctataacgagctcaatctaggacgaagagaggagtacgatgttttggacaagagacgtggccgggaccctgagatggggggaaagccgagaaggaagaaccctcaggaaggcctgtacaatgaactgcagaaagataagatggcggaggcctacagtgagattgggatgaaaggcgagcgccggaggggcaaggggcacgatggcctttaccagggtctcagtacagccaccaaggacacctacgacgcccttcacatgcaggccctgccccctcgcggctctggcgagggaaggggttccctgcttacttgcggcgacgtcgaagagaatcccggtccgatggccctcccagtaactgccctccttttgcccctcgcactccttcttcatgccgctcgccccaactgggtcaacgtgattagcgatttgaagaaaatcgaggaccttatacagtctatgcatattgacgctacactgtatactgagagtgatgtacacccgtcctgtaaggtaacggccatgaaatgctttcttctggagctccaggtcatcagcttggagtctggggacgcaagcatccacgatacggttgaaaacctcatcatccttgcgaacaactctctctcatctaatggaaacgttacagagagtgggtgtaaggagtgcgaagagttggaagaaaaaaacatcaaagaatttcttcaatccttcgttcacatagtgcaaatgttcattaacacgtccactaccacacccgccccgaggccacctacgccggcaccgactatcgccagtcaacccctctctctgcgccccgaggcttgccggcctgcggctggtggggcggtccacacccggggcctggattttgcgtgcgatatatacatctgggcacctcttgccggcacctgcggagtgctgcttctctcactcgttattacgctgtactgctaa

SEQ ID NO: 169 - DNA, 2172 bp, synthetic construct
  misc_feature 1..2172: note = NK77.36_CD70_DB03_A06 construct
  source 1..2172: mol_type = other DNA
atggccttaccagtgaccgccttgctcctgccgctggccttgctgctccacgccgccaggccggactacaaagacgatgacgataaaggcggtggtggctctggtggtggcggatcccaggtgcagctggtgcagtctggggctgaggtgaagaagcctggggcctcagtgaaggtttcctgcaaggcatctggaggtaccttcagtagctacgcaatttcatgggtgcgacaggcccctggacaagggcttgagtggatgggatggatctctcccaacagtggtgacacacactacgcacagaagttccagggcagagtcaccatgaccagggacacgtccacgagcacagtctacatggagctgagcagcctgagatctgaggacacggccgtgtattactgtgctagagactgggggtcaggctggtacgtggactactggggccaagggaccctggtcaccgtctcctcaggtggaggcggttcaggcggaggtggctctggcggtggcggatcggacatccagatgacccagtctccatcctccctgtctgcatctgtaggagacagagtcaccatcacttgccaggcaagtcaggacattagcgattctttaaattggtatcagcagaaaccagggaaagcccctaagctcctgatctattccgcatccagtttgcaaagtggggtcccatcaaggttcagtggcagtggatctgggacagatttcactctcaccatcagcagtctgcaacctgaagattttgcaacttactactgtcaacagagttttacaaccccttatacgttcggccaagggaccaaggtggaaatcaaaaccacgacgccagcgccgcggccaccaacaccggcgcccaccatcgcgtcgcagcccctgtccctgcgcccagaggcgtgccggccagcggcggggggcgcagtgcacacgagggggctggacttcgcctgtgatatctacatctgggcgcccttggccgggacttgtggggtccttctcctgtcactggttatcaccctttactgccggagggaccagaggctgccccccgatgcccacaagccccctgggggaggcagtttccggacccccatccaagaggagcaggccgacgcccactccaccctggccaagatcagagtgaagttcagcaggagcgcagacgcccccgcgtaccagcagggccagaaccagctctataacgagctcaatctaggacgaagagaggagtacgatgttttggacaagagacgtggccgggaccctgagatggggggaaagccgagaaggaagaaccctcaggaaggcctgtacaatgaactgcagaaagataagatggcggaggcctacagtgagattgggatgaaaggcgagcgccggaggggcaaggggcacgatggcctttaccagggtctcagtacagccaccaaggacacctacgacgcccttcacatgcaggccctgccccctcgcggctctggcgagggaaggggttccctgcttacttgcggcgacgtcgaagagaatcccggtccgatggccctcccagtaactgccctccttttgcccctcgcactccttcttcatgccgctcgccccaactgggtcaacgtgattagcgatttgaagaaaatcgaggaccttatacagtctatgcatattgacgctacactgtatactgagagtgatgtacacccgtcctgtaaggtaacggccatgaaatgctttcttctggagctccaggtcatcagcttggagtctggggacgcaagcatccacgatacggttgaaaacctcatcatccttgcgaacaactctctctcatctaatggaaacgttacagagagtgggtgtaaggagtgcgaagagttggaagaaaaaaacatcaaagaatttcttcaatccttcgttcacatagtgcaaatgttcattaacacgtccactaccacacccgccccgaggccacctacgccggcaccgactatcgccagtcaacccctctctctgcgccccgaggcttgccggcctgcggctggtggggcggtccacacccggggcctggattttgcgtgcgatatatacatctgggcacctcttgccggcacctgcggagtgctgcttctctcactcgttattacgctgtactgctaa

SEQ ID NO: 170 - DNA, 2172 bp, synthetic construct
  misc_feature 1..2172: note = NK77.37_CD70_DB03_A07 construct
  source 1..2172: mol_type = other DNA
atggccttaccagtgaccgccttgctcctgccgctggccttgctgctccacgccgccaggccggactacaaagacgatgacgataaaggcggtggtggctctggtggtggcggatcccaggtgcagctggtgcagtctggggctgaggtgaagaagcctgggtcctcggtgaaggtctcctgcaaggcttctggaggcaccttcaatagctatggaatcagctgggtgcgacaggcccctggacaagggcttgagtggatgggaggtatcatccctatctttggtacagcaaactacgcacagaagttccagggcagagtcacgattaccgcggacgaatccacgagcacagcctacatggagctgagcagcctgagatctgaggacacggccgtgtattactgtgcgagagatacctacggggatgacgcttttgatatctggggccaagggacaatggtcaccgtctcttcaggtggaggcggttcaggcggaggtggctctggcggtggcggatcggacatccagatgacccagtctccatcttctctgtctgcatctgtaggagacagagtcaccatcacttgtcgggcgagtcagtctattagcagctggttagcctggtatcagcagaaaccagggaaagcccctaagctcctgatctatgatgcatccaatttggaaacaggggtcccatcaaggttcagcggcagtggatctgggacagatttcactctcactatcagcagcctgcagcctgaagattttgcaacttactattgtcaacagaatttcagtcctcctctcaccttcggccaagggacacgactggagattaaaaccacgacgccagcgccgcggccaccaacaccggcgcccaccatcgcgtcgcagcccctgtccctgcgcccagaggcgtgccggccagcggcggggggcgcagtgcacacgagggggctggacttcgcctgtgatatctacatctgggcgcccttggccgggacttgtggggtccttctcctgtcactggttatcaccctttactgccggagggaccagaggctgccccccgatgcccacaagccccctgggggaggcagtttccggacccccatccaagaggagcaggccgacgcccactccaccctggccaagatcagagtgaagttcagcaggagcgcagacgcccccgcgtaccagcagggccagaaccagctctataacgagctcaatctaggacgaagagaggagtacgatgttttggacaagagacgtggccgggaccctgagatggggggaaagccgagaaggaagaaccctcaggaaggcctgtacaatgaactgcagaaagataagatggcggaggcctacagtgagattgggatgaaaggcgagcgccggaggggcaaggggcacgatggcctttaccagggtctcagtacagccaccaaggacacctacgacgcccttcacatgcaggccctgccccctcgcggctctggcgagggaaggggttccctgcttacttgcggcgacgtcgaagagaatcccggtccgatggccctcccagtaactgccctccttttgcccctcgcactccttcttcatgccgctcgccccaactgggtcaacgtgattagcgatttgaagaaaatcgaggaccttatacagtctatgcatattgacgctacactgtatactgagagtgatgtacacccgtcctgtaaggtaacggccatgaaatgctttcttctggagctccaggtcatcagcttggagtctggggacgcaagcatccacgatacggttgaaaacctcatcatccttgcgaacaactctctctcatctaatggaaacgttacagagagtgggtgtaaggagtgcgaagagttggaagaaaaaaacatcaaagaatttcttcaatccttcgttcacatagtgcaaatgttcattaacacgtccactaccacacccgccccgaggccacctacgccggcaccgactatcgccagtcaacccctctctctgcgccccgaggcttgccggcctgcggctggtggggcggtccacacccggggcctggattttgcgtgcgatatatacatctgggcacctcttgccggcacctgcggagtgctgcttctctcactcgttattacgctgtactgctaa

SEQ ID NO: 171 - DNA, 2187 bp, synthetic construct
  misc_feature 1..2187: note = NK77.38_CD70_DB03_A08 construct
  source 1..2187: mol_type = other DNA
atggccttaccagtgaccgccttgctcctgccgctggccttgctgctccacgccgccaggccggactacaaagacgatgacgataaaggcggtggtggctctggtggtggcggatcccaggtgcagctggtgcagtctggggctgaggtgaagaagcctggggcctcagtgaaggtttcctgcaaggcatctggatacagtttcaccagctactatatgcactgggtgcgacaggcccctggacaagggcttgagtggatgggaataatcaaccctagtggtgggactacaagctacgcacagaagttccagggcagagtcaccatgaccagggacacgtccacgagcacagtctacatggagctgagcagcctgagatctgaggacacggccgtgtattactgtgctagagacaattccccgtatagctcaagctggtgggactactttgactactggggccaagggaccctggtcaccgtctcctcaggtggaggcggttcaggcggaggtggctctggcggtggcggatcggacatccagatgacccagtctccatcctccctgtctgcatctgtaggagacagagtcaccatcacttgccgggcaagtcaggacattcggcattatttagcatggtatcagcagaaaccagggaaagcccctaagctcctgatctatgacgcatccagtttgcaaagtggggtcccatcaaggttcagtggcagtggatctgggacagatttcactctcaccatcagcagtctgcaacctgaagattttgcaacttactactgtcaacagacctacgacgcacctatcaccttcggccaagggacacgactggagattaaaaccacgacgccagcgccgcggccaccaacaccggcgcccaccatcgcgtcgcagcccctgtccctgcgcccagaggcgtgccggccagcggcggggggcgcagtgcacacgagggggctggacttcgcctgtgatatctacatctgggcgcccttggccgggacttgtggggtccttctcctgtcactggttatcaccctttactgccggagggaccagaggctgccccccgatgcccacaagccccctgggggaggcagtttccggacccccatccaagaggagcaggccgacgcccactccaccctggccaagatcagagtgaagttcagcaggagcgcagacgcccccgcgtaccagcagggccagaaccagctctataacgagctcaatctaggacgaagagaggagtacgatgttttggacaagagacgtggccgggaccctgagatggggggaaagccgagaaggaagaaccctcaggaaggcctgtacaatgaactgcagaaagataagatggcggaggcctacagtgagattgggatgaaaggcgagcgccggaggggcaaggggcacgatggcctttaccagggtctcagtacagccaccaaggacacctacgacgcccttcacatgcaggccctgccccctcgcggctctggcgagggaaggggttccctgcttacttgcggcgacgtcgaagagaatcccggtccgatggccctcccagtaactgccctccttttgcccctcgcactccttcttcatgccgctcgccccaactgggtcaacgtgattagcgatttgaagaaaatcgaggaccttatacagtctatgcatattgacgctacactgtatactgagagtgatgtacacccgtcctgtaaggtaacggccatgaaatgctttcttctggagctccaggtcatcagcttggagtctggggacgcaagcatccacgatacggttgaaaacctcatcatccttgcgaacaactctctctcatctaatggaaacgttacagagagtgggtgtaaggagtgcgaagagttggaagaaaaaaacatcaaagaatttcttcaatccttcgttcacatagtgcaaatgttcattaacacgtccactaccacacccgccccgaggccacctacgccggcaccgactatcgccagtcaacccctctctctgcgccccgaggcttgccggcctgcggctggtggggcggtccacacccggggcctggattttgcgtgcgatatatacatctgggcacctcttgccggcacctgcggagtgctgcttctctcactcgttattacgctgtactgctaa

SEQ ID NO: 172 - DNA, 2181 bp, synthetic construct
  misc_feature 1..2181: note = NK77.39_CD70_DB03_A09 construct
  source 1..2181: mol_type = other DNA
atggccttaccagtgaccgccttgctcctgccgctggccttgctgctccacgccgccaggccggactacaaagacgatgacgataaaggcggtggtggctctggtggtggcggatcccaggtgcagctggtgcagtctggggctgaggtgaagaagcctggggcctcagtgaaggtttcctgcaaggcatctggatacaccttcaccgattactatattcactgggtgcgacaggcccctggacaagggcttgagtggatgggatggatcaccccgaacagtggttatacatattacgcacagaatttccagggcagagtcaccatgaccagggacacgtccacgagcacagtctacatggagctgagcagcctgagatctgaggacacggccgtgtattactgtgctagaaacacagactgttatggggacttcctggggctggatgtctggggccaagggacaacggtcaccgtctcttcaggtggaggcggttcaggcggaggtggctctggcggtggcggatcggacatcgtgatgacccagtctccagactccctggctgtgtctctgggcgagagggccaccatcaactgccgggccagctctagtatttccaactacttagcttggtaccagcagaaaccaggacagcctcctaagctgctcatttacggcgcatctacccgggcttccggggtccctgaccgattcagtggcagcgggtctgggacagatttcactctcaccatcagcagcctgcaggctgaagatgtggcagtttattactgtcagcaaagctatagtactcctctcactttcggccaggggaccaaggtggagatcaaaaccacgacgccagcgccgcggccaccaacaccggcgcccaccatcgcgtcgcagcccctgtccctgcgcccagaggcgtgccggccagcggcggggggcgcagtgcacacgagggggctggacttcgcctgtgatatctacatctgggcgcccttggccgggacttgtggggtccttctcctgtcactggttatcaccctttactgccggagggaccagaggctgccccccgatgcccacaagccccctgggggaggcagtttccggacccccatccaagaggagcaggccgacgcccactccaccctggccaagatcagagtgaagttcagcaggagcgcagacgcccccgcgtaccagcagggccagaaccagctctataacgagctcaatctaggacgaagagaggagtacgatgttttggacaagagacgtggccgggaccctgagatggggggaaagccgagaaggaagaaccctcaggaaggcctgtacaatgaactgcagaaagataagatggcggaggcctacagtgagattgggatgaaaggcgagcgccggaggggcaaggggcacgatggcctttaccagggtctcagtacagccaccaaggacacctacgacgcccttcacatgcaggccctgccccctcgcggctctggcgagggaaggggttccctgcttacttgcggcgacgtcgaagagaatcccggtccgatggccctcccagtaactgccctccttttgcccctcgcactccttcttcatgccgctcgccccaactgggtcaacgtgattagcgatttgaagaaaatcgaggaccttatacagtctatgcatattgacgctacactgtatactgagagtgatgtacacccgtcctgtaaggtaacggccatgaaatgctttcttctggagctccaggtcatcagcttggagtctggggacgcaagcatccacgatacggttgaaaacctcatcatccttgcgaacaactctctctcatctaatggaaacgttacagagagtgggtgtaaggagtgcgaagagttggaagaaaaaaacatcaaagaatttcttcaatccttcgttcacatagtgcaaatgttcattaacacgtccactaccacacccgccccgaggccacctacgccggcaccgactatcgccagtcaacccctctctctgcgccccgaggcttgccggcctgcggctggtggggcggtccacacccggggcctggattttgcgtgcgatatatacatctgggcacctcttgccggcacctgcggagtgctgcttctctcactcgttattacgctgtactgctaa

SEQ ID NO: 173 - DNA, 2181 bp, synthetic construct
  misc_feature 1..2181: note = NK77.40_CD70_DB03_A11 construct
  source 1..2181: mol_type = other DNA
atggccttaccagtgaccgccttgctcctgccgctggccttgctgctccacgccgccaggccggactacaaagacgatgacgataaaggcggtggtggctctggtggtggcggatcccaggtgcagctggtgcagtctggggctgaggtgaagaagcctggggcctcagtgaaggtttcctgcaaggcatctggatacaccttcaacggctaccttatgcactgggtgcgacaggcccctggacaagggcttgagtggatgggaatagttaacccttccgatggtagcacaggctacgcacagaagttccagggcagagtcaccatgaccagggacacgtccacgagcacagtctacatggagctgagcagcctgagatctgaggacacggccgtgtattactgtgcgaaggacacaggactccgctactttgactggctacttgactactggggccaagggaccctggtcaccgtctcctcaggtggaggcggttcaggcggaggtggctctggcggtggcggatcggacatccagatgacccagtctccatcctccctgtctgcatctgtaggagacagagtcaccatcacttgccgggcgagtcagggcattaccaattttttagcctggtatcagcagaaaccagggaaagcccctaagctcctgatatatgatgcatccaacttggaaaccggggtcccatccaggttcagtggcagtggatctgggacggatttcactctcaccatcagcagcctgcagcctgaagattttgcaacttattactgtcaacagagctatggggcccctcttaccttcggccaagggacacgactggagattaaaaccacgacgccagcgccgcggccaccaacaccggcgcccaccatcgcgtcgcagcccctgtccctgcgcccagaggcgtgccggccagcggcggggggcgcagtgcacacgagggggctggacttcgcctgtgatatctacatctgggcgcccttggccgggacttgtggggtccttctcctgtcactggttatcaccctttactgccggagggaccagaggctgccccccgatgcccacaagccccctgggggaggcagtttccggacccccatccaagaggagcaggccgacgcccactccaccctggccaagatcagagtgaagttcagcaggagcgcagacgcccccgcgtaccagcagggccagaaccagctctataacgagctcaatctaggacgaagagaggagtacgatgttttggacaagagacgtggccgggaccctgagatggggggaaagccgagaaggaagaaccctcaggaaggcctgtacaatgaactgcagaaagataagatggcggaggcctacagtgagattgggatgaaaggcgagcgccggaggggcaaggggcacgatggcctttaccagggtctcagtacagccaccaaggacacctacgacgcccttcacatgcaggccctgccccctcgcggctctggcgagggaaggggttccctgcttacttgcggcgacgtcgaagagaatcccggtccgatggccctcccagtaactgccctccttttgcccctcgcactccttcttcatgccgctcgccccaactgggtcaacgtgattagcgatttgaagaaaatcgaggaccttatacagtctatgcatattgacgctacactgtatactgagagtgatgtacacccgtcctgtaaggtaacggccatgaaatgctttcttctggagctccaggtcatcagcttggagtctggggacgcaagcatccacgatacggttgaaaacctcatcatccttgcgaacaactctctctcatctaatggaaacgttacagagagtgggtgtaaggagtgcgaagagttggaagaaaaaaacatcaaagaatttcttcaatccttcgttcacatagtgcaaatgttcattaacacgtccactaccacacccgccccgaggccacctacgccggcaccgactatcgccagtcaacccctctctctgcgccccgaggcttgccggcctgcggctggtggggcggtccacacccggggcctggattttgcgtgcgatatatacatctgggcacctcttgccggcacctgcggagtgctgcttctctcactcgttattacgctgtactgctaa

SEQ ID NO: 174 - DNA, 2169 bp, synthetic construct
  misc_feature 1..2169: note = NK77.41_CD70_DB03_A12 construct
  source 1..2169: mol_type = other DNA
atggccttaccagtgaccgccttgctcctgccgctggccttgctgctccacgccgccaggccggactacaaagacgatgacgataaaggcggtggtggctctggtggtggcggatcccaggtgcagctggtgcagtctggggctgaggtgaagaagcctggggcctcagtgaaggtttcctgcaaggcatctggatacaccttcaccagctactatatgcactgggtgcgacaggcccctggacaagggcttgagtggatgggaataatcgatcctagtggtggccgaacaatttacgcacagcgcttccagggcagagtcaccatgaccagggacacgtccacgagcacagtctacatggagctgagcagcctgagatctgaggacacggccgtgtattactgtgctagacacgaagcaggcggaatctttgactactggggccaagggaccctggtcaccgtctcctcaggtggaggcggttcaggcggaggtggctctggcggtggcggatcggacatccagatgacccagtctccatcctccctgtctgcatctgtaggagacagagtcaccatcacttgccaagcaagtcaggacattagcaactatttaaattggtatcagcagaaaccagggaaagcccctaagctcctgatctattccgcatccaccttgcaaagtggggtcccatcaaggttcagtggcagtggatctgggacagatttcactctcaccatcagcagtctgcaacctgaagattttgcaacttactactgtcaacagagttacagttctccttatagattcggccaagggaccaaggtggaaatcaaaaccacgacgccagcgccgcggccaccaacaccggcgcccaccatcgcgtcgcagcccctgtccctgcgcccagaggcgtgccggccagcggcggggggcgcagtgcacacgagggggctggacttcgcctgtgatatctacatctgggcgcccttggccgggacttgtggggtccttctcctgtcactggttatcaccctttactgccggagggaccagaggctgccccccgatgcccacaagccccctgggggaggcagtttccggacccccatccaagaggagcaggccgacgcccactccaccctggccaagatcagagtgaagttcagcaggagcgcagacgcccccgcgtaccagcagggccagaaccagctctataacgagctcaatctaggacgaagagaggagtacgatgttttggacaagagacgtggccgggaccctgagatggggggaaagccgagaaggaagaaccctcaggaaggcctgtacaatgaactgcagaaagataagatggcggaggcctacagtgagattgggatgaaaggcgagcgccggaggggcaaggggcacgatggcctttaccagggtctcagtacagccaccaaggacacctacgacgcccttcacatgcaggccctgccccctcgcggctctggcgagggaaggggttccctgcttacttgcggcgacgtcgaagagaatcccggtccgatggccctcccagtaactgccctccttttgcccctcgcactccttcttcatgccgctcgccccaactgggtcaacgtgattagcgatttgaagaaaatcgaggaccttatacagtctatgcatattgacgctacactgtatactgagagtgatgtacacccgtcctgtaaggtaacggccatgaaatgctttcttctggagctccaggtcatcagcttggagtctggggacgcaagcatccacgatacggttgaaaacctcatcatccttgcgaacaactctctctcatctaatggaaacgttacagagagtgggtgtaaggagtgcgaagagttggaagaaaaaaacatcaaagaatttcttcaatccttcgttcacatagtgcaaatgttcattaacacgtccactaccacacccgccccgaggccacctacgccggcaccgactatcgccagtcaacccctctctctgcgccccgaggcttgccggcctgcggctggtggggcggtccacacccggggcctggattttgcgtgcgatatatacatctgggcacctcttgccggcacctgcggagtgctgcttctctcactcgttattacgctgtactgctaa

SEQ ID NO: 175 - DNA, 2193 bp, synthetic construct
  misc_feature 1..2193: note = NK77.42_CD70_DB03_B01 construct
  source 1..2193: mol_type = other DNA
atggccttaccagtgaccgccttgctcctgccgctggccttgctgctccacgccgccaggccggactacaaagacgatgacgataaaggcggtggtggctctggtggtggcggatcccaggtccagctggtgcagtctggggctgaggtgaagaagcctgggtcctcagtgaaggtctcctgcaaggcttctggatataccttcagcgactcctacatgcattgggtgcgacaggcccctggacaagggcttgagtgggtcggagggatcatccctatggcaggtatacccgcctacgcagaggaattccagggcagagtcacgattaccgcggacgagtccacgagcacagcctacatggagctgagcagcctgagatctgaggacacggccgtgtattactgtgcgagagccgacgattatgggggaaattggtacttcgatctctggggccgtggcaccctggtcactgtctcctcaggtggaggcggttcaggcggaggtggctctggcggtggcggatcggatattgtgatgactcagtctccactctccctgcccgtcacccctggagagccggcctccatctcctgcaggtctagtcagagcctcctccactctaatggctacaactatttggattggtacctgcagaagccagggcagtctccacagctcctgatctatgcagcttctagtctccagtccggggtccctgacaggttcagtggcagtggatcaggcacagattttacactgaaaatcagcagagtggaggctgaggatgttggggtttattactgcatgcaaggggcccattggcctccgacttttggccaggggaccaagctggagatcaaaaccacgacgccagcgccgcggccaccaacaccggcgcccaccatcgcgtcgcagcccctgtccctgcgcccagaggcgtgccggccagcggcggggggcgcagtgcacacgagggggctggacttcgcctgtgatatctacatctgggcgcccttggccgggacttgtggggtccttctcctgtcactggttatcaccctttactgccggagggaccagaggctgccccccgatgcccacaagccccctgggggaggcagtttccggacccccatccaagaggagcaggccgacgcccactccaccctggccaagatcagagtgaagttcagcaggagcgcagacgcccccgcgtaccagcagggccagaaccagctctataacgagctcaatctaggacgaagagaggagtacgatgttttggacaagagacgtggccgggaccctgagatggggggaaagccgagaaggaagaaccctcaggaaggcctgtacaatgaactgcagaaagataagatggcggaggcctacagtgagattgggatgaaaggcgagcgccggaggggcaaggggcacgatggcctttaccagggtctcagtacagccaccaaggacacctacgacgcccttcacatgcaggccctgccccctcgcggctctggcgagggaaggggttccctgcttacttgcggcgacgtcgaagagaatcccggtccgatggccctcccagtaactgccctccttttgcccctcgcactccttcttcatgccgctcgccccaactgggtcaacgtgattagcgatttgaagaaaatcgaggaccttatacagtctatgcatattgacgctacactgtatactgagagtgatgtacacccgtcctgtaaggtaacggccatgaaatgctttcttctggagctccaggtcatcagcttggagtctggggacgcaagcatccacgatacggttgaaaacctcatcatccttgcgaacaactctctctcatctaatggaaacgttacagagagtgggtgtaaggagtgcgaagagttggaagaaaaaaacatcaaagaatttcttcaatccttcgttcacatagtgcaaatgttcattaacacgtccactaccacacccgccccgaggccacctacgccggcaccgactatcgccagtcaacccctctctctgcgccccgaggcttgccggcctgcggctggtggggcggtccacacccggggcctggattttgcgtgcgatatatacatctgggcacctcttgccggcacctgcggagtgctgcttctctcactcgttattacgctgtactgctaa

SEQ ID NO: 176 - DNA, 2175 bp, synthetic construct
  misc_feature 1..2175: note = NK77.43_CD70_DB03_B04 construct
  source 1..2175: mol_type = other DNA
atggccttaccagtgaccgccttgctcctgccgctggccttgctgctccacgccgccaggccggactacaaagacgatgacgataaaggcggtggtggctctggtggtggcggatcccaggtgcagctggtgcagtctggggctgaggtgaagaagcctggggcctcagtgaaggtttcctgcaaggcatctggatacatcttcaccgactactatatgcactgggtgcgacaggcccctggacaagggcttgagtggatgggaataatcaaccctagtggtggcagcacaagctacgcacagaagttccagggcagagtcaccatgaccagggacacgtccacgagcacagtctacatggagctgagcagcctgagatctgaggacacggccgtgtattactgtgctagagactcaggatggtatgagtcctggttcgacccctggggccagggaaccctggtcaccgtctcctcaggtggaggcggttcaggcggaggtggctctggcggtggcggatcggacatccagatgacccagtctccatcctccctgtctgcatctgtaggagacagagtcaccatcacttgccgggcaagtcaggacattagggatgggttaggctggtatcagcagaaaccagggaaagcccctaagctcctgatctatgctgcatccactttgcaaagtggggtcccatcaaggttcagtggcagtggatctgggacagatttcactctcaccatcagcagtctgcaacctgaagattttgcaacttactactgtcaacagagttacgggacccctcctacgttcggccaagggaccaaggtggaaatcaaaaccacgacgccagcgccgcggccaccaacaccggcgcccaccatcgcgtcgcagcccctgtccctgcgcccagaggcgtgccggccagcggcggggggcgcagtgcacacgagggggctggacttcgcctgtgatatctacatctgggcgcccttggccgggacttgtggggtccttctcctgtcactggttatcaccctttactgccggagggaccagaggctgccccccgatgcccacaagccccctgggggaggcagtttccggacccccatccaagaggagcaggccgacgcccactccaccctggccaagatcagagtgaagttcagcaggagcgcagacgcccccgcgtaccagcagggccagaaccagctctataacgagctcaatctaggacgaagagaggagtacgatgttttggacaagagacgtggccgggaccctgagatggggggaaagccgagaaggaagaaccctcaggaaggcctgtacaatgaactgcagaaagataagatggcggaggcctacagtgagattgggatgaaaggcgagcgccggaggggcaaggggcacgatggcctttaccagggtctcagtacagccaccaaggacacctacgacgcccttcacatgcaggccctgccccctcgcggctctggcgagggaaggggttccctgcttacttgcggcgacgtcgaagagaatcccggtccgatggccctcccagtaactgccctccttttgcccctcgcactccttcttcatgccgctcgccccaactgggtcaacgtgattagcgatttgaagaaaatcgaggaccttatacagtctatgcatattgacgctacactgtatactgagagtgatgtacacccgtcctgtaaggtaacggccatgaaatgctttcttctggagctccaggtcatcagcttggagtctggggacgcaagcatccacgatacggttgaaaacctcatcatccttgcgaacaactctctctcatctaatggaaacgttacagagagtgggtgtaaggagtgcgaagagttggaagaaaaaaacatcaaagaatttcttcaatccttcgttcacatagtgcaaatgttcattaacacgtccactaccacacccgccccgaggccacctacgccggcaccgactatcgccagtcaacccctctctctgcgccccgaggcttgccggcctgcggctggtggggcggtccacacccggggcctggattttgcgtgcgatatatacatctgggcacctcttgccggcacctgcggagtgctgcttctctcactcgttattacgctgtactgctaa

SEQ ID NO: 177 - DNA, 2178 bp, synthetic construct
  misc_feature 1..2178: note = NK77.44_CD70_DB03_B06 construct
  source 1..2178: mol_type = other DNA
atggccttaccagtgaccgccttgctcctgccgctggccttgctgctccacgccgccaggccggactacaaagacgatgacgataaaggcggtggtggctctggtggtggcggatcccaggtgcagctggtgcagtctggggctgaggtgaagaagcctggggcctcagtgaaggtttcctgcaaggcatctggatacaccttcaccgactactatcttcactgggtgcgacaggcccctggacaagggcttgagtggatgggatggatcagcgcctacaatggtaacacaaattacgcacagaagttccagggcagagtcaccatgaccagggacacgtccacgagcacagtctacatggagctgagcagcctgagatctgaggacacggccgtgtattactgtgctagagagattgtgggtgctacagaagattggtacttcgatctctggggccgtggcaccctggtcactgtctcctcaggtggaggcggttcaggcggaggtggctctggcggtggcggatcggaaatagtgatgacgcagtctccagccaccctgtctgtgtctccaggggaaagagccaccctctcctgcagggccagtcagagtgttagcagctatttagcctggtaccagcagaaacctggccaggctcccaggctcctcatctatggtgcatccaccagggccactggtatcccagccaggttcagtggcagtgggtctgggacagagttcactctcaccatcagcagcctgcagtctgaagattttgcagtttattactgtcagcagtatgattcctcccctacgttcggccaagggaccaaggtggaaatcaaaaccacgacgccagcgccgcggccaccaacaccggcgcccaccatcgcgtcgcagcccctgtccctgcgcccagaggcgtgccggccagcggcggggggcgcagtgcacacgagggggctggacttcgcctgtgatatctacatctgggcgcccttggccgggacttgtggggtccttctcctgtcactggttatcaccctttactgccggagggaccagaggctgccccccgatgcccacaagccccctgggggaggcagtttccggacccccatccaagaggagcaggccgacgcccactccaccctggccaagatcagagtgaagttcagcaggagcgcagacgcccccgcgtaccagcagggccagaaccagctctataacgagctcaatctaggacgaagagaggagtacgatgttttggacaagagacgtggccgggaccctgagatggggggaaagccgagaaggaagaaccctcaggaaggcctgtacaatgaactgcagaaagataagatggcggaggcctacagtgagattgggatgaaaggcgagcgccggaggggcaaggggcacgatggcctttaccagggtctcagtacagccaccaaggacacctacgacgcccttcacatgcaggccctgccccctcgcggctctggcgagggaaggggttccctgcttacttgcggcgacgtcgaagagaatcccggtccgatggccctcccagtaactgccctccttttgcccctcgcactccttcttcatgccgctcgccccaactgggtcaacgtgattagcgatttgaagaaaatcgaggaccttatacagtctatgcatattgacgctacactgtatactgagagtgatgtacacccgtcctgtaaggtaacggccatgaaatgctttcttctggagctccaggtcatcagcttggagtctggggacgcaagcatccacgatacggttgaaaacctcatcatccttgcgaacaactctctctcatctaatggaaacgttacagagagtgggtgtaaggagtgcgaagagttggaagaaaaaaacatcaaagaatttcttcaatccttcgttcacatagtgcaaatgttcattaacacgtccactaccacacccgccccgaggccacctacgccggcaccgactatcgccagtcaacccctctctctgcgccccgaggcttgccggcctgcggctggtggggcggtccacacccggggcctggattttgcgtgcgatatatacatctgggcacctcttgccggcacctgcggagtgctgcttctctcactcgttattacgctgtactgctaa

SEQ ID NO: 178 - DNA, 2172 bp, synthetic construct
  misc_feature 1..2172: note = NK77.45_CD70_DB03_B09 construct
  source 1..2172: mol_type = other DNA
atggccttaccagtgaccgccttgctcctgccgctggccttgctgctccacgccgccaggccggactacaaagacgatgacgataaaggcggtggtggctctggtggtggcggatcccaggtgcagctggtgcagtctggggctgaggtgaagaagcctggggcctcagtgaaggtttcctgcaaggcatctggatacaccttcaccgcctactatctgcactgggtgcgacaggcccctggacaagggcttgagtggatgggaatgatcaaccccaacaatggtggcacaatttacgcacagacattccagggcagagtcaccatgaccagggacacgtccacgagcacagtctacatggagctgagcagcctgagatctgaggacacggccgtgtattactgtgctagagacctgggcggctacgtcctgtttgactactggggccaagggaccctggtcaccgtctcctcaggtggaggcggttcaggcggaggtggctctggcggtggcggatcggacatccagatgacccagtctccatcctccctgtctgcatctgtaggagacagagtcaccatcacttgccgggcaagtcagagcattagcagctatttaaattggtatcagcagaaaccagggaaagcccctaagctcctgatctatgatgcatccaacttggaaaccggggtcccatcaaggttcagtggcagtggatctgggacagatttcactctcaccatcagcagtctgcaacctgaagattttgcaacttactactgtcaacagagtcacagtgcgcctatcaccttcggccaagggacacgactggagattaaaaccacgacgccagcgccgcggccaccaacaccggcgcccaccatcgcgtcgcagcccctgtccctgcgcccagaggcgtgccggccagcggcggggggcgcagtgcacacgagggggctggacttcgcctgtgatatctacatctgggcgcccttggccgggacttgtggggtccttctcctgtcactggttatcaccctttactgccggagggaccagaggctgccccccgatgcccacaagccccctgggggaggcagtttccggacccccatccaagaggagcaggccgacgcccactccaccctggccaagatcagagtgaagttcagcaggagcgcagacgcccccgcgtaccagcagggccagaaccagctctataacgagctcaatctaggacgaagagaggagtacgatgttttggacaagagacgtggccgggaccctgagatggggggaaagccgagaaggaagaaccctcaggaaggcctgtacaatgaactgcagaaagataagatggcggaggcctacagtgagattgggatgaaaggcgagcgccggaggggcaaggggcacgatggcctttaccagggtctcagtacagccaccaaggacacctacgacgcccttcacatgcaggccctgccccctcgcggctctggcgagggaaggggttccctgcttacttgcggcgacgtcgaagagaatcccggtccgatggccctcccagtaactgccctccttttgcccctcgcactccttcttcatgccgctcgccccaactgggtcaacgtgattagcgatttgaagaaaatcgaggaccttatacagtctatgcatattgacgctacactgtatactgagagtgatgtacacccgtcctgtaaggtaacggccatgaaatgctttcttctggagctccaggtcatcagcttggagtctggggacgcaagcatccacgatacggttgaaaacctcatcatccttgcgaacaactctctctcatctaatggaaacgttacagagagtgggtgtaaggagtgcgaagagttggaagaaaaaaacatcaaagaatttcttcaatccttcgttcacatagtgcaaatgttcattaacacgtccactaccacacccgccccgaggccacctacgccggcaccgactatcgccagtcaacccctctctctgcgccccgaggcttgccggcctgcggctggtggggcggtccacacccggggcctggattttgcgtgcgatatatacatctgggcacctcttgccggcacctgcggagtgctgcttctctcactcgttattacgctgtactgctaa

SEQ ID NO: 179 - DNA, 2172 bp, synthetic construct
  misc_feature 1..2172: note = NK77.46_CD70_DB03_C05 construct
  source 1..2172: mol_type = other DNA
atggccttaccagtgaccgccttgctcctgccgctggccttgctgctccacgccgccaggccggactacaaagacgatgacgataaaggcggtggtggctctggtggtggcggatcccaggtgcagctggtgcagtctggggctgaggtgaagaagcctggggcctcagtgaaggtttcctgcaaggcatctggatacaccttcaccgactactatattcactgggtgcgacaggcccctggacaagggcttgagtggatgggaatgatcaaccctagaggaggtagcacaacttacgcacagtcattccagggcagagtcaccatgaccagggacacgtccacgagcacagtctacatggagctgagcagcctgagatctgaggacacggccgtgtattactgtgctagagatttaggtgactatggggactacgactactggggccaagggaccctggtcaccgtctcctcaggtggaggcggttcaggcggaggtggctctggcggtggcggatcggacatccagatgacccagtctccatcctccctgtctgcatctgtaggagacagagtcaccatcacttgccgggcaagtcagagcattagcacaaacttagcttggtatcagcagaaaccagggaaagcccctaagctcctgatctatgatgcatcctatttggaggctggggtcccatcaaggttcagtggcagtggatctgggacagatttcactctcaccatcagcagtctgcaacctgaagattttgcaacttactactgtcaacagagttacagtacccctccgacttttggccaggggaccaagctggagatcaaaaccacgacgccagcgccgcggccaccaacaccggcgcccaccatcgcgtcgcagcccctgtccctgcgcccagaggcgtgccggccagcggcggggggcgcagtgcacacgagggggctggacttcgcctgtgatatctacatctgggcgcccttggccgggacttgtggggtccttctcctgtcactggttatcaccctttactgccggagggaccagaggctgccccccgatgcccacaagccccctgggggaggcagtttccggacccccatccaagaggagcaggccgacgcccactccaccctggccaagatcagagtgaagttcagcaggagcgcagacgcccccgcgtaccagcagggccagaaccagctctataacgagctcaatctaggacgaagagaggagtacgatgttttggacaagagacgtggccgggaccctgagatggggggaaagccgagaaggaagaaccctcaggaaggcctgtacaatgaactgcagaaagataagatggcggaggcctacagtgagattgggatgaaaggcgagcgccggaggggcaaggggcacgatggcctttaccagggtctcagtacagccaccaaggacacctacgacgcccttcacatgcaggccctgccccctcgcggctctggcgagggaaggggttccctgcttacttgcggcgacgtcgaagagaatcccggtccgatggccctcccagtaactgccctccttttgcccctcgcactccttcttcatgccgctcgccccaactgggtcaacgtgattagcgatttgaagaaaatcgaggaccttatacagtctatgcatattgacgctacactgtatactgagagtgatgtacacccgtcctgtaaggtaacggccatgaaatgctttcttctggagctccaggtcatcagcttggagtctggggacgcaagcatccacgatacggttgaaaacctcatcatccttgcgaacaactctctctcatctaatggaaacgttacagagagtgggtgtaaggagtgcgaagagttggaagaaaaaaacatcaaagaatttcttcaatccttcgttcacatagtgcaaatgttcattaacacgtccactaccacacccgccccgaggccacctacgccggcaccgactatcgccagtcaacccctctctctgcgccccgaggcttgccggcctgcggctggtggggcggtccacacccggggcctggattttgcgtgcgatatatacatctgggcacctcttgccggcacctgcggagtgctgcttctctcactcgttattacgctgtactgctaa

SEQ ID NO: 180 - DNA, 2205 bp, synthetic construct
  misc_feature 1..2205: note = NK77.47_CD70_DB03_D11 construct
  source 1..2205: mol_type = other DNA
atggccttaccagtgaccgccttgctcctgccgctggccttgctgctccacgccgccaggccggactacaaagacgatgacgataaaggcggtggtggctctggtggtggcggatccgaggtgcagctgttggagtctgggggaggcttggtacagcctggggggtccctgagactctcctgtgcagcctctggattcacctttagcaattcagatatgaattgggtccgccaggctccagggaaggggctggagtgggtctcagctattagtggtggaggtgacacactctactacgcagactccgtgaagggccggttcaccatctccagagacaattccaagaacacgctgtatctgcaaatgaacagcctgagagccgaggacacggccgtatattactgtgcgatggccagcgctttggacagtagcggtgacaatgaggcttttgatatctggggccaagggacaacagtcaccgtctcttcaggtggaggcggttcaggcggaggtggctctggcggtggcggatcggacatcgtgatgacccagtctccagactccctggctgtgtctctgggcgagagggccaccatcaactgcaagtccagccagagtgttttatattccagtaataacaagaactacttagcttggtaccagcagaaaccaggacagcctcctaagctgctcatttactgggcatctacccgggattccggggtccctgaccgattcagtggcagcgggtctgggacagatttcactctcaccatcagcagcctgcaggctgaagatgtggcagtttattactgtcagcaatattatggcttccctcccaccttcggccaagggacacgactggagattaaaaccacgacgccagcgccgcggccaccaacaccggcgcccaccatcgcgtcgcagcccctgtccctgcgcccagaggcgtgccggccagcggcggggggcgcagtgcacacgagggggctggacttcgcctgtgatatctacatctgggcgcccttggccgggacttgtggggtccttctcctgtcactggttatcaccctttactgccggagggaccagaggctgccccccgatgcccacaagccccctgggggaggcagtttccggacccccatccaagaggagcaggccgacgcccactccaccctggccaagatcagagtgaagttcagcaggagcgcagacgcccccgcgtaccagcagggccagaaccagctctataacgagctcaatctaggacgaagagaggagtacgatgttttggacaagagacgtggccgggaccctgagatggggggaaagccgagaaggaagaaccctcaggaaggcctgtacaatgaactgcagaaagataagatggcggaggcctacagtgagattgggatgaaaggcgagcgccggaggggcaaggggcacgatggcctttaccagggtctcagtacagccaccaaggacacctacgacgcccttcacatgcaggccctgccccctcgcggctctggcgagggaaggggttccctgcttacttgcggcgacgtcgaagagaatcccggtccgatggccctcccagtaactgccctccttttgcccctcgcactccttcttcatgccgctcgccccaactgggtcaacgtgattagcgatttgaagaaaatcgaggaccttatacagtctatgcatattgacgctacactgtatactgagagtgatgtacacccgtcctgtaaggtaacggccatgaaatgctttcttctggagctccaggtcatcagcttggagtctggggacgcaagcatccacgatacggttgaaaacctcatcatccttgcgaacaactctctctcatctaatggaaacgttacagagagtgggtgtaaggagtgcgaagagttggaagaaaaaaacatcaaagaatttcttcaatccttcgttcacatagtgcaaatgttcattaacacgtccactaccacacccgccccgaggccacctacgccggcaccgactatcgccagtcaacccctctctctgcgccccgaggcttgccggcctgcggctggtggggcggtccacacccggggcctggattttgcgtgcgatatatacatctgggcacctcttgccggcacctgcggagtgctgcttctctcactcgttattacgctgtactgctaa

SEQ ID NO: 181 - DNA, 2181 bp, synthetic construct
  misc_feature 1..2181: note = NK77.48_CD70_DB03_E01 construct
  source 1..2181: mol_type = other DNA
atggccttaccagtgaccgccttgctcctgccgctggccttgctgctccacgccgccaggccggactacaaagacgatgacgataaaggcggtggtggctctggtggtggcggatcccaggtgcagctggtgcagtctggggctgaggtgaagaagcctggggcctcagtgaaggtttcctgcaaggcatctggatacaccttcaccagctactatatgcactgggtgcgacaggcccctggacaagggcttgagtggatgggatggatcaacccaaataacggtggtacaagctacgcacagaagttccagggcagagtcaccatgaccagggacacgtccacgagcacagtctacatggagctgagcagcctgagatctgaggacacggccgtgtattactgtgctagagtggaggacgatttctggagcggccctagctttgactactggggccaagggaccctggtcaccgtctcctcaggtggaggcggttcaggcggaggtggctctggcggtggcggatcggacatccagatgacccagtctccatcctccctgtctgcatctgtaggagacagagtcaccatcacttgccaagcaagtcacgacattagcaaattcttaaattggtatcagcagaaaccagggaaagcccctaagctcctgatctatgatgcatccaatttgcaacgaggggtcccatcaaggttcagtggcagtggatctgggacagatttcactctcaccatcagcagtctgcaacctgaagattttgcaacttactactgtcaacagacctacagtttccctttcacttttggccaggggaccaagctggagatcaaaaccacgacgccagcgccgcggccaccaacaccggcgcccaccatcgcgtcgcagcccctgtccctgcgcccagaggcgtgccggccagcggcggggggcgcagtgcacacgagggggctggacttcgcctgtgatatctacatctgggcgcccttggccgggacttgtggggtccttctcctgtcactggttatcaccctttactgccggagggaccagaggctgccccccgatgcccacaagccccctgggggaggcagtttccggacccccatccaagaggagcaggccgacgcccactccaccctggccaagatcagagtgaagttcagcaggagcgcagacgcccccgcgtaccagcagggccagaaccagctctataacgagctcaatctaggacgaagagaggagtacgatgttttggacaagagacgtggccgggaccctgagatggggggaaagccgagaaggaagaaccctcaggaaggcctgtacaatgaactgcagaaagataagatggcggaggcctacagtgagattgggatgaaaggcgagcgccggaggggcaaggggcacgatggcctttaccagggtctcagtacagccaccaaggacacctacgacgcccttcacatgcaggccctgccccctcgcggctctggcgagggaaggggttccctgcttacttgcggcgacgtcgaagagaatcccggtccgatggccctcccagtaactgccctccttttgcccctcgcactccttcttcatgccgctcgccccaactgggtcaacgtgattagcgatttgaagaaaatcgaggaccttatacagtctatgcatattgacgctacactgtatactgagagtgatgtacacccgtcctgtaaggtaacggccatgaaatgctttcttctggagctccaggtcatcagcttggagtctggggacgcaagcatccacgatacggttgaaaacctcatcatccttgcgaacaactctctctcatctaatggaaacgttacagagagtgggtgtaaggagtgcgaagagttggaagaaaaaaacatcaaagaatttcttcaatccttcgttcacatagtgcaaatgttcattaacacgtccactaccacacccgccccgaggccacctacgccggcaccgactatcgccagtcaacccctctctctgcgccccgaggcttgccggcctgcggctggtggggcggtccacacccggggcctggattttgcgtgcgatatatacatctgggcacctcttgccggcacctgcggagtgctgcttctctcactcgttattacgctgtactgctaa

SEQ ID NO: 182 - DNA, 2187 bp, synthetic construct
  misc_feature 1..2187: note = NK77.49_CD70_DB03_E03 construct
  source 1..2187: mol_type = other DNA
atggccttaccagtgaccgccttgctcctgccgctggccttgctgctccacgccgccaggccggactacaaagacgatgacgataaaggcggtggtggctctggtggtggcggatcccaggtgcagctggtgcagtctggggctgaggtgaagaagcctgggtcctcggtgaaggtctcctgcaaggcttctggaggcaccttcaccaattatgctttcagctgggtgcgacaggcccctggacaagggcttgagtggatgggaggtatcatccctatcagcggtgccgcaaactacgcacagaagttccagggcagagtcacgattaccgcggacgaatccacgagcacagcctacatggagctgagcagcctgagatctgaggacacggccgtgtattactgtgcgagagggtccggactggacgatgcttttgatatctggggccaagggacaatggtcaccgtctcttcaggtggaggcggttcaggcggaggtggctctggcggtggcggatcggatattgtgatgactcagtctccactctccctgcccgtcacccctggagagccggcctccatctcctgcaggtctagtcagagcctcctccattcaaacgggtacaactatttggattggtacctgcagaagccagggcagtctccacagctcctgatctatgatgcctcttcccttcagtccggggtccctgacaggttcagtggcagtggatcaggcacagattttacactgaaaatcagcagagtggaggctgaggatgttggggtttattactgcatgcaagctcggcaaactcctctgaccttcggccaagggacacgactggagattaaaaccacgacgccagcgccgcggccaccaacaccggcgcccaccatcgcgtcgcagcccctgtccctgcgcccagaggcgtgccggccagcggcggggggcgcagtgcacacgagggggctggacttcgcctgtgatatctacatctgggcgcccttggccgggacttgtggggtccttctcctgtcactggttatcaccctttactgccggagggaccagaggctgccccccgatgcccacaagccccctgggggaggcagtttccggacccccatccaagaggagcaggccgacgcccactccaccctggccaagatcagagtgaagttcagcaggagcgcagacgcccccgcgtaccagcagggccagaaccagctctataacgagctcaatctaggacgaagagaggagtacgatgttttggacaagagacgtggccgggaccctgagatggggggaaagccgagaaggaagaaccctcaggaaggcctgtacaatgaactgcagaaagataagatggcggaggcctacagtgagattgggatgaaaggcgagcgccggaggggcaaggggcacgatggcctttaccagggtctcagtacagccaccaaggacacctacgacgcccttcacatgcaggccctgccccctcgcggctctggcgagggaaggggttccctgcttacttgcggcgacgtcgaagagaatcccggtccgatggccctcccagtaactgccctccttttgcccctcgcactccttcttcatgccgctcgccccaactgggtcaacgtgattagcgatttgaagaaaatcgaggaccttatacagtctatgcatattgacgctacactgtatactgagagtgatgtacacccgtcctgtaaggtaacggccatgaaatgctttcttctggagctccaggtcatcagcttggagtctggggacgcaagcatccacgatacggttgaaaacctcatcatccttgcgaacaactctctctcatctaatggaaacgttacagagagtgggtgtaaggagtgcgaagagttggaagaaaaaaacatcaaagaatttcttcaatccttcgttcacatagtgcaaatgttcattaacacgtccactaccacacccgccccgaggccacctacgccggcaccgactatcgccagtcaacccctctctctgcgccccgaggcttgccggcctgcggctggtggggcggtccacacccggggcctggattttgcgtgcgatatatacatctgggcacctcttgccggcacctgcggagtgctgcttctctcactcgttattacgctgtactgctaa

SEQ ID NO: 183 - DNA, 2217 bp, synthetic construct
  misc_feature 1..2217: note = NK77.50_CD70_DB03_E09 construct
  source 1..2217: mol_type = other DNA
atggccttaccagtgaccgccttgctcctgccgctggccttgctgctccacgccgccaggccggactacaaagacgatgacgataaaggcggtggtggctctggtggtggcggatcccaggtgcagctggtgcagtctggggctgaggtgaagaagcctggggcctcagtgaaggtttcctgcaaggcatctggatacaccttcaccgcgtactatatgcactgggtgcgacaggcccctggacaagggcttgagtggatgggatggatgaaccccaatagtggtaacacaggatacgcacagaagttccagggcagagtcaccatgaccagggacacgtccacgagcacagtctacatggagctgagcagcctgagatctgaggacacggccgtgtattactgtgctagagagggcagaatcgattacggggactacgacgactactactattactacggtatggacgtgtggggccaagggaccactgtcaccgtctcctcaggtggaggcggttcaggcggaggtggctctggcggtggcggatcggatattgtgatgactcagtctccactctccctgcccgtcacccctggagagccggcctccatctcctgcaggtctagtcagagcctcctgcattcaaatggttacaactatttggattggtacctgcagaagccagggcagtctccacagctcctgatctatgctgcttctaatttacagggtggggtccctgacaggttcagtggcagtggatcaggcacagattttacactgaaaatcagcagagtggaggctgaggatgttggggtttattactgcatgcaaacactagagtcccctgtaactttcggcggagggaccaaggtggagatcaaaaccacgacgccagcgccgcggccaccaacaccggcgcccaccatcgcgtcgcagcccctgtccctgcgcccagaggcgtgccggccagcggcggggggcgcagtgcacacgagggggctggacttcgcctgtgatatctacatctgggcgcccttggccgggacttgtggggtccttctcctgtcactggttatcaccctttactgccggagggaccagaggctgccccccgatgcccacaagccccctgggggaggcagtttccggacccccatccaagaggagcaggccgacgcccactccaccctggccaagatcagagtgaagttcagcaggagcgcagacgcccccgcgtaccagcagggccagaaccagctctataacgagctcaatctaggacgaagagaggagtacgatgttttggacaagagacgtggccgggaccctgagatggggggaaagccgagaaggaagaaccctcaggaaggcctgtacaatgaactgcagaaagataagatggcggaggcctacagtgagattgggatgaaaggcgagcgccggaggggcaaggggcacgatggcctttaccagggtctcagtacagccaccaaggacacctacgacgcccttcacatgcaggccctgccccctcgcggctctggcgagggaaggggttccctgcttacttgcggcgacgtcgaagagaatcccggtccgatggccctcccagtaactgccctccttttgcccctcgcactccttcttcatgccgctcgccccaactgggtcaacgtgattagcgatttgaagaaaatcgaggaccttatacagtctatgcatattgacgctacactgtatactgagagtgatgtacacccgtcctgtaaggtaacggccatgaaatgctttcttctggagctccaggtcatcagcttggagtctggggacgcaagcatccacgatacggttgaaaacctcatcatccttgcgaacaactctctctcatctaatggaaacgttacagagagtgggtgtaaggagtgcgaagagttggaagaaaaaaacatcaaagaatttcttcaatccttcgttcacatagtgcaaatgttcattaacacgtccactaccacacccgccccgaggccacctacgccggcaccgactatcgccagtcaacccctctctctgcgccccgaggcttgccggcctgcggctggtggggcggtccacacccggggcctggattttgcgtgcgatatatacatctgggcacctcttgccggcacctgcggagtgctgcttctctcactcgttattacgctgtactgctaa

SEQ ID NO: 184 - DNA, 2175 bp, synthetic construct
  misc_feature 1..2175: note = NK77.51_CD70_DB03_F02 construct
  source 1..2175: mol_type = other DNA
atggccttaccagtgaccgccttgctcctgccgctggccttgctgctccacgccgccaggccggactacaaagacgatgacgataaaggcggtggtggctctggtggtggcggatcccaggtgcagctggtgcagtctggggctgaggtgaagaagcctggggcctcagtgaaggtttcctgcaaggcatctggatacaccttcaccgattactatgtgcactgggtgcgacaggcccctggacaagggcttgagtggatgggaacgatcaaccctagtggtgggagcacaagctacgcacagaagttccagggcagagtcaccatgaccagggacacgtccacgagcacagtctacatggagctgagcagcctgagatctgaggacacggccgtgtattactgtgctagagaccagggactctggttcaccggttttgactactggggccaagggaccctggtcaccgtctcctcaggtggaggcggttcaggcggaggtggctctggcggtggcggatcggacatccagatgacccagtctccatcctccctgtctgcatctgtaggagacagagtcaccatcacttgccgggcaagtcagggcattagcaacaatttaaattggtatcagcagaaaccagggaaagcccctaagctcctgatctatgatgcatccaacttggaacgtggggtcccatcaaggttcagtggcagtggatctgggacagatttcactctcaccatcagcagtctgcaacctgaagattttgcaacttactactgtcaacagagttacgacggtcctatcaccttcggccaagggacacgactggagattaaaaccacgacgccagcgccgcggccaccaacaccggcgcccaccatcgcgtcgcagcccctgtccctgcgcccagaggcgtgccggccagcggcggggggcgcagtgcacacgagggggctggacttcgcctgtgatatctacatctgggcgcccttggccgggacttgtggggtccttctcctgtcactggttatcaccctttactgccggagggaccagaggctgccccccgatgcccacaagccccctgggggaggcagtttccggacccccatccaagaggagcaggccgacgcccactccaccctggccaagatcagagtgaagttcagcaggagcgcagacgcccccgcgtaccagcagggccagaaccagctctataacgagctcaatctaggacgaagagaggagtacgatgttttggacaagagacgtggccgggaccctgagatggggggaaagccgagaaggaagaaccctcaggaaggcctgtacaatgaactgcagaaagataagatggcggaggcctacagtgagattgggatgaaaggcgagcgccggaggggcaaggggcacgatggcctttaccagggtctcagtacagccaccaaggacacctacgacgcccttcacatgcaggccctgccccctcgcggctctggcgagggaaggggttccctgcttacttgcggcgacgtcgaagagaatcccggtccgatggccctcccagtaactgccctccttttgcccctcgcactccttcttcatgccgctcgccccaactgggtcaacgtgattagcgatttgaagaaaatcgaggaccttatacagtctatgcatattgacgctacactgtatactgagagtgatgtacacccgtcctgtaaggtaacggccatgaaatgctttcttctggagctccaggtcatcagcttggagtctggggacgcaagcatccacgatacggttgaaaacctcatcatccttgcgaacaactctctctcatctaatggaaacgttacagagagtgggtgtaaggagtgcgaagagttggaagaaaaaaacatcaaagaatttcttcaatccttcgttcacatagtgcaaatgttcattaacacgtccactaccacacccgccccgaggccacctacgccggcaccgactatcgccagtcaacccctctctctgcgccccgaggcttgccggcctgcggctggtggggcggtccacacccggggcctggattttgcgtgcgatatatacatctgggcacctcttgccggcacctgcggagtgctgcttctctcactcgttattacgctgtactgctaa

SEQ ID NO: 185 - DNA, 2175 bp, synthetic construct
  misc_feature 1..2175: note = NK77.52_CD70_DB03_F05 construct
  source 1..2175: mol_type = other DNA
atggccttaccagtgaccgccttgctcctgccgctggccttgctgctccacgccgccaggccggactacaaagacgatgacgataaaggcggtggtggctctggtggtggcggatcccaggtgcagctggtgcagtctggggctgaggtgaagaagcctggggcctcagtgaaggtttcctgcaaggcatctggatacaccttcaccgcctaccacatgcactgggtgcgacaggcccctggacaagggcttgagtggatgggaataatcaaccctggagacggtgccacagggtacgcacagaatctccagggcagagtcaccatgaccagggacacgtccacgagcacagtctacatggagctgagcagcctgagatctgaggacacggccgtgtattactgtgctggtgagggcatttccggatcagatgcttttgatatctggggccaagggacattagtcaccgtctcttcaggtggaggcggttcaggcggaggtggctctggcggtggcggatcggacatccagatgacccagtctccatcctccctgtctgcatctgtaggagacagagtcaccatcacttgccgggcaagtcagagcattagcagctggttagcttggtatcagcagaaaccagggaaagcccctaagctcctgatctatgctgcatccagtttgcaaagtggggtcccatcaaggttcagtggcagtggatctgggacagatttcactctcaccatcagcagtctgcaacctgaagattttgcaacttactactgtttgcaggactacagttatcctctcactttcggcggagggaccaaggtggagatcaaaaccacgacgccagcgccgcggccaccaacaccggcgcccaccatcgcgtcgcagcccctgtccctgcgcccagaggcgtgccggccagcggcggggggcgcagtgcacacgagggggctggacttcgcctgtgatatctacatctgggcgcccttggccgggacttgtggggtccttctcctgtcactggttatcaccctttactgccggagggaccagaggctgccccccgatgcccacaagccccctgggggaggcagtttccggacccccatccaagaggagcaggccgacgcccactccaccctggccaagatcagagtgaagttcagcaggagcgcagacgcccccgcgtaccagcagggccagaaccagctctataacgagctcaatctaggacgaagagaggagtacgatgttttggacaagagacgtggccgggaccctgagatggggggaaagccgagaaggaagaaccctcaggaaggcctgtacaatgaactgcagaaagataagatggcggaggcctacagtgagattgggatgaaaggcgagcgccggaggggcaaggggcacgatggcctttaccagggtctcagtacagccaccaaggacacctacgacgcccttcacatgcaggccctgccccctcgcggctctggcgagggaaggggttccctgcttacttgcggcgacgtcgaagagaatcccggtccgatggccctcccagtaactgccctccttttgcccctcgcactccttcttcatgccgctcgccccaactgggtcaacgtgattagcgatttgaagaaaatcgaggaccttatacagtctatgcatattgacgctacactgtatactgagagtgatgtacacccgtcctgtaaggtaacggccatgaaatgctttcttctggagctccaggtcatcagcttggagtctggggacgcaagcatccacgatacggttgaaaacctcatcatccttgcgaacaactctctctcatctaatggaaacgttacagagagtgggtgtaaggagtgcgaagagttggaagaaaaaaacatcaaagaatttcttcaatccttcgttcacatagtgcaaatgttcattaacacgtccactaccacacccgccccgaggccacctacgccggcaccgactatcgccagtcaacccctctctctgcgccccgaggcttgccggcctgcggctggtggggcggtccacacccggggcctggattttgcgtgcgatatatacatctgggcacctcttgccggcacctgcggagtgctgcttctctcactcgttattacgctgtactgctaa

SEQ ID NO: 186 - DNA, 2169 bp, synthetic construct
  misc_feature 1..2169: note = NK77.53_CD70_DB03_F06 construct
  source 1..2169: mol_type = other DNA
atggccttaccagtgaccgccttgctcctgccgctggccttgctgctccacgccgccaggccggactacaaagacgatgacgataaaggcggtggtggctctggtggtggcggatcccaggtgcagctggtgcagtctggggctgaggtgaagaagcctgggtcctcggtgaaggtctcctgcaaggcttctggaggcaccttcagcagctatgctatcagctgggtgcgacaggcccctggacaagggcttgagtggatgggatggatgaatcctaactctggtaacacaggttacgcacagaagttccagggcagagtcacgattaccgcggacgaatccacgagcacagcctacatggagctgagcagcctgagatctgaggacacggccgtgtattactgtgcgtggggagtcgatccgtactactttgactactggggccaagggaccctggtcaccgtctcctcaggtggaggcggttcaggcggaggtggctctggcggtggcggatcggacatccagatgacccagtctccatcctccctgtctgcatctgtaggagacagagtcaccatcacttgccgggcaagtcagagcattaacaggtggttagcgtggtatcagcagaaaccagggaaagcccctaagctcctgatctatgacgcatccaatttggagaccggggtcccatcaaggttcagtggcagtggatctgggacagatttcactctcaccatcagcagtctgcaacctgaagattttgcaacttactactgtcaacagagttacattacccctctcactttcggcggagggaccaaggtggagatcaaaaccacgacgccagcgccgcggccaccaacaccggcgcccaccatcgcgtcgcagcccctgtccctgcgcccagaggcgtgccggccagcggcggggggcgcagtgcacacgagggggctggacttcgcctgtgatatctacatctgggcgcccttggccgggacttgtggggtccttctcctgtcactggttatcaccctttactgccggagggaccagaggctgccccccgatgcccacaagccccctgggggaggcagtttccggacccccatccaagaggagcaggccgacgcccactccaccctggccaagatcagagtgaagttcagcaggagcgcagacgcccccgcgtaccagcagggccagaaccagctctataacgagctcaatctaggacgaagagaggagtacgatgttttggacaagagacgtggccgggaccctgagatggggggaaagccgagaaggaagaaccctcaggaaggcctgtacaatgaactgcagaaagataagatggcggaggcctacagtgagattgggatgaaaggcgagcgccggaggggcaaggggcacgatggcctttaccagggtctcagtacagccaccaaggacacctacgacgcccttcacatgcaggccctgccccctcgcggctctggcgagggaaggggttccctgcttacttgcggcgacgtcgaagagaatcccggtccgatggccctcccagtaactgccctccttttgcccctcgcactccttcttcatgccgctcgccccaactgggtcaacgtgattagcgatttgaagaaaatcgaggaccttatacagtctatgcatattgacgctacactgtatactgagagtgatgtacacccgtcctgtaaggtaacggccatgaaatgctttcttctggagctccaggtcatcagcttggagtctggggacgcaagcatccacgatacggttgaaaacctcatcatccttgcgaacaactctctctcatctaatggaaacgttacagagagtgggtgtaaggagtgcgaagagttggaagaaaaaaacatcaaagaatttcttcaatccttcgttcacatagtgcaaatgttcattaacacgtccactaccacacccgccccgaggccacctacgccggcaccgactatcgccagtcaacccctctctctgcgccccgaggcttgccggcctgcggctggtggggcggtccacacccggggcctggattttgcgtgcgatatatacatctgggcacctcttgccggcacctgcggagtgctgcttctctcactcgttattacgctgtactgctaa

SEQ ID NO: 187 - DNA, 2169 bp, synthetic construct
  misc_feature 1..2169: note = NK77.54_CD70_DB03_F09 construct
  source 1..2169: mol_type = other DNA
atggccttaccagtgaccgccttgctcctgccgctggccttgctgctccacgccgccaggccggactacaaagacgatgacgataaaggcggtggtggctctggtggtggcggatcccaggtgcagctggtgcagtctggggctgaggtgaagaagcctggggcctcagtgaaggtttcctgcaaggcatctggatacaccttcaccagctactatatgcactgggtgcgacaggcccctggacaagggcttgagtggatgggaatattcaacccctccgatggtagcacaagctacgcacagaagttccagggcagagtcaccatgaccagggacacgtccacgagcacagtctacatggagctgagcagcctgagatctgaggacacggccgtgtattactgtgctagagatgttggtgagaccacgttcgacccctggggccagggaaccctggtcaccgtctcctcaggtggaggcggttcaggcggaggtggctctggcggtggcggatcggacatccagatgacccagtctccatcctccctgtctgcatctgtaggagacagagtcaccatcacttgccaggcaagtcaggatattagcaactatttaaattggtatcagcagaaaccagggaaagcccctaagctcctgatctatgacgcatccagtttggaaagtggggtcccatcaaggttcagtggcagtggatctgggacagatttcactctcaccatcagcagtctgcaacctgaagattttgcaacttactactgtcaacagactaatagttttcctatcaccttcggccaagggacacgactggagattaaaaccacgacgccagcgccgcggccaccaacaccggcgcccaccatcgcgtcgcagcccctgtccctgcgcccagaggcgtgccggccagcggcggggggcgcagtgcacacgagggggctggacttcgcctgtgatatctacatctgggcgcccttggccgggacttgtggggtccttctcctgtcactggttatcaccctttactgccggagggaccagaggctgccccccgatgcccacaagccccctgggggaggcagtttccggacccccatccaagaggagcaggccgacgcccactccaccctggccaagatcagagtgaagttcagcaggagcgcagacgcccccgcgtaccagcagggccagaaccagctctataacgagctcaatctaggacgaagagaggagtacgatgttttggacaagagacgtggccgggaccctgagatggggggaaagccgagaaggaagaaccctcaggaaggcctgtacaatgaactgcagaaagataagatggcggaggcctacagtgagattgggatgaaaggcgagcgccggaggggcaaggggcacgatggcctttaccagggtctcagtacagccaccaaggacacctacgacgcccttcacatgcaggccctgccccctcgcggctctggcgagggaaggggttccctgcttacttgcggcgacgtcgaagagaatcccggtccgatggccctcccagtaactgccctccttttgcccctcgcactccttcttcatgccgctcgccccaactgggtcaacgtgattagcgatttgaagaaaatcgaggaccttatacagtctatgcatattgacgctacactgtatactgagagtgatgtacacccgtcctgtaaggtaacggccatgaaatgctttcttctggagctccaggtcatcagcttggagtctggggacgcaagcatccacgatacggttgaaaacctcatcatccttgcgaacaactctctctcatctaatggaaacgttacagagagtgggtgtaaggagtgcgaagagttggaagaaaaaaacatcaaagaatttcttcaatccttcgttcacatagtgcaaatgttcattaacacgtccactaccacacccgccccgaggccacctacgccggcaccgactatcgccagtcaacccctctctctgcgccccgaggcttgccggcctgcggctggtggggcggtccacacccggggcctggattttgcgtgcgatatatacatctgggcacctcttgccggcacctgcggagtgctgcttctctcactcgttattacgctgtactgctaa

SEQ ID NO: 188 - DNA, 2184 bp, synthetic construct
  misc_feature 1..2184: note = NK77.55_CD70_DB03_F12 construct
  source 1..2184: mol_type = other DNA
atggccttaccagtgaccgccttgctcctgccgctggccttgctgctccacgccgccaggccggactacaaagacgatgacgataaaggcggtggtggctctggtggtggcggatcccaggtgcagctcgttcaaagcggcgccgaggtcaagaaaccaggcgctagcgttaaagttagttgtaaagcctccggctatactttcacatcttacggcatttcttgggtacggcaggcaccggggcagggtttggaatggatggggtggatttccgcctataacggccacacaaattacgcgcagaaattccaggggcgcgttacgatgacacgcgatacctctacctctaccgtttatatggaacttagtagtcttcgttcggaggataccgctgtctactattgcgcacgtgacagtgtacggggttgggactactactacggcatgggggtctggggccaagggaccactgtcaccgtctcctcaggtggaggcggttcaggcggaggtggctctggcggtggcggatcggacatccagatgacccagtctccatcctccctgtctgcatctgtaggagacagagtcaccatcacttgccaggcaagtcaggacattagaaacttcttaaattggtatcagcagaaaccagggaaagcccctaagctcctgatctatgctgcatccacgttgcaaagtggggtcccatcaaggttcagtggcagtggatctgggacagatttcactctcaccatcagcagtctgcaacctgaagattttgcaacttactactgtcaacagagttacagtgcccctagcacttttggccaggggaccaagctggagatcaaaaccacgacgccagcgccgcggccaccaacaccggcgcccaccatcgcgtcgcagcccctgtccctgcgcccagaggcgtgccggccagcggcggggggcgcagtgcacacgagggggctggacttcgcctgtgatatctacatctgggcgcccttggccgggacttgtggggtccttctcctgtcactggttatcaccctttactgccggagggaccagaggctgccccccgatgcccacaagccccctgggggaggcagtttccggacccccatccaagaggagcaggccgacgcccactccaccctggccaagatcagagtgaagttcagcaggagcgcagacgcccccgcgtaccagcagggccagaaccagctctataacgagctcaatctaggacgaagagaggagtacgatgttttggacaagagacgtggccgggaccctgagatggggggaaagccgagaaggaagaaccctcaggaaggcctgtacaatgaactgcagaaagataagatggcggaggcctacagtgagattgggatgaaaggcgagcgccggaggggcaaggggcacgatggcctttaccagggtctcagtacagccaccaaggacacctacgacgcccttcacatgcaggccctgccccctcgcggctctggcgagggaaggggttccctgcttacttgcggcgacgtcgaagagaatcccggtccgatggccctcccagtaactgccctccttttgcccctcgcactccttcttcatgccgctcgccccaactgggtcaacgtgattagcgatttgaagaaaatcgaggaccttatacagtctatgcatattgacgctacactgtatactgagagtgatgtacacccgtcctgtaaggtaacggccatgaaatgctttcttctggagctccaggtcatcagcttggagtctggggacgcaagcatccacgatacggttgaaaacctcatcatccttgcgaacaactctctctcatctaatggaaacgttacagagagtgggtgtaaggagtgcgaagagttggaagaaaaaaacatcaaagaatttcttcaatccttcgttcacatagtgcaaatgttcattaacacgtccactaccacacccgccccgaggccacctacgccggcaccgactatcgccagtcaacccctctctctgcgccccgaggcttgccggcctgcggctggtggggcggtccacacccggggcctggattttgcgtgcgatatatacatctgggcacctcttgccggcacctgcggagtgctgcttctctcactcgttattacgctgtactgctaa

SEQ ID NO: 189 - DNA, 2175 bp, synthetic construct
  misc_feature 1..2175: note = NK77.56_CD70_DB03_G06 construct
  source 1..2175: mol_type = other DNA
atggccttaccagtgaccgccttgctcctgccgctggccttgctgctccacgccgccaggccggactacaaagacgatgacgataaaggcggtggtggctctggtggtggcggatcccaggtgcagctggtgcagtctggggctgaggtgaagaagcctgggtcttcagtgaaggtttcctgcaaggcatctggatacaccttcatcgactactatatgcactgggtgcgacaggcccctggacaagggcttgagtggatgggatggatgaaccctcacagtggtaacagtgataatgcaccgaagttccagggcagagtcaccatcaccgcagacgagtccacgagcacagcatacatggagctgagcagcctgagatctgaggacacggccgtgtattactgtgctagaggttactccggatacgatctgacggctgactactggggccaagggaccctggtcaccgtctcctcaggtggaggcggttcaggcggaggtggctctggcggtggcggatcggacatccagatgacccagtctccatcctccctgtctgcatctgtaggagacagagtcaccatcacttgccgggcaagtcagagcattagcaattatttaaattggtatcagcagaaaccagggaaagcccctaagctcctgatctatgacgcatccaacttggagaccggggtcccatcaaggttcagtggcagtggatctgggacagatttcactctcaccatcagcagtctgcaacctgaagattttgcaacttactactgtcaacagagttacagtacccctatcaccttcggccaagggacacgactggagattaaaaccacgacgccagcgccgcggccaccaacaccggcgcccaccatcgcgtcgcagcccctgtccctgcgcccagaggcgtgccggccagcggcggggggcgcagtgcacacgagggggctggacttcgcctgtgatatctacatctgggcgcccttggccgggacttgtggggtccttctcctgtcactggttatcaccctttactgccggagggaccagaggctgccccccgatgcccacaagccccctgggggaggcagtttccggacccccatccaagaggagcaggccgacgcccactccaccctggccaagatcagagtgaagttcagcaggagcgcagacgcccccgcgtaccagcagggccagaaccagctctataacgagctcaatctaggacgaagagaggagtacgatgttttggacaagagacgtggccgggaccctgagatggggggaaagccgagaaggaagaaccctcaggaaggcctgtacaatgaactgcagaaagataagatggcggaggcctacagtgagattgggatgaaaggcgagcgccggaggggcaaggggcacgatggcctttaccagggtctcagtacagccaccaaggacacctacgacgcccttcacatgcaggccctgccccctcgcggctctggcgagggaaggggttccctgcttacttgcggcgacgtcgaagagaatcccggtccgatggccctcccagtaactgccctccttttgcccctcgcactccttcttcatgccgctcgccccaactgggtcaacgtgattagcgatttgaagaaaatcgaggaccttatacagtctatgcatattgacgctacactgtatactgagagtgatgtacacccgtcctgtaaggtaacggccatgaaatgctttcttctggagctccaggtcatcagcttggagtctggggacgcaagcatccacgatacggttgaaaacctcatcatccttgcgaacaactctctctcatctaatggaaacgttacagagagtgggtgtaaggagtgcgaagagttggaagaaaaaaacatcaaagaatttcttcaatccttcgttcacatagtgcaaatgttcattaacacgtccactaccacacccgccccgaggccacctacgccggcaccgactatcgccagtcaacccctctctctgcgccccgaggcttgccggcctgcggctggtggggcggtccacacccggggcctggattttgcgtgcgatatatacatctgggcacctcttgccggcacctgcggagtgctgcttctctcactcgttattacgctgtactgctaa

SEQ ID NO: 190 - DNA, 2202 bp, synthetic construct
  misc_feature 1..2202: note = NK77.57_CD70_DB03_G11 construct
  source 1..2202: mol_type = other DNA
atggccttaccagtgaccgccttgctcctgccgctggccttgctgctccacgccgccaggccggactacaaagacgatgacgataaaggcggtggtggctctggtggtggcggatcccaggtgcagctggtgcagtctggggctgaggtgaagaagcctggggcctcagtgaaggtctcctgcaaggcttctggatacaccttcaccggccagtatatgcactgggtgcgacaggcccctggacaagggcttgagtggatgggatggatcaacccgaacactggtgacacaaactatgcacagaagtttcagggcagggtcaccatgaccagggacacgtccaccagcacagtatacatggagctgagcagcctgagatctgaagacacggccgtgtattactgtgcgagagacagcgttttcgaggttgaagggggtactgattattattattactacggtatggatgtctggggccaagggacaatggtcaccgtctcttcaggtggaggcggttcaggcggaggtggctctggcggtggcggatcggacatccagatgacccagtctccatcctccctgtctgcatctgtaggagacagagtcaccatcacttgccgggcaagtgaaaccattagcggctggttagcctggtatcagcagaaaccagggaaagcccctaagctcctgatctatgacgcatccaacttggagactggggtcccatcaaggttcagtggcagtggatctgggacagatttcactctcaccatcagcagtctgcaacctgaagattttgcaacttactactgtcaacagagttacagtaccccttggacgttcggccaagggaccaagctggaaatcaaaaccacgacgccagcgccgcggccaccaacaccggcgcccaccatcgcgtcgcagcccctgtccctgcgcccagaggcgtgccggccagcggcggggggcgcagtgcacacgagggggctggacttcgcctgtgatatctacatctgggcgcccttggccgggacttgtggggtccttctcctgtcactggttatcaccctttactgccggagggaccagaggctgccccccgatgcccacaagccccctgggggaggcagtttccggacccccatccaagaggagcaggccgacgcccactccaccctggccaagatcagagtgaagttcagcaggagcgcagacgcccccgcgtaccagcagggccagaaccagctctataacgagctcaatctaggacgaagagaggagtacgatgttttggacaagagacgtggccgggaccctgagatggggggaaagccgagaaggaagaaccctcaggaaggcctgtacaatgaactgcagaaagataagatggcggaggcctacagtgagattgggatgaaaggcgagcgccggaggggcaaggggcacgatggcctttaccagggtctcagtacagccaccaaggacacctacgacgcccttcacatgcaggccctgccccctcgcggctctggcgagggaaggggttccctgcttacttgcggcgacgtcgaagagaatcccggtccgatggccctcccagtaactgccctccttttgcccctcgcactccttcttcatgccgctcgccccaactgggtcaacgtgattagcgatttgaagaaaatcgaggaccttatacagtctatgcatattgacgctacactgtatactgagagtgatgtacacccgtcctgtaaggtaacggccatgaaatgctttcttctggagctccaggtcatcagcttggagtctggggacgcaagcatccacgatacggttgaaaacctcatcatccttgcgaacaactctctctcatctaatggaaacgttacagagagtgggtgtaaggagtgcgaagagttggaagaaaaaaacatcaaagaatttcttcaatccttcgttcacatagtgcaaatgttcattaacacgtccactaccacacccgccccgaggccacctacgccggcaccgactatcgccagtcaacccctctctctgcgccccgaggcttgccggcctgcggctggtggggcggtccacacccggggcctggattttgcgtgcgatatatacatctgggcacctcttgccggcacctgcggagtgctgcttctctcactcgttattacgctgtactgctaa

SEQ ID NO: 191 - DNA, 2172 bp, synthetic construct
  misc_feature 1..2172: note = NK77.58_CD70_DB03_H08 construct
  source 1..2172: mol_type = other DNA
atggccttaccagtgaccgccttgctcctgccgctggccttgctgctccacgccgccaggccggactacaaagacgatgacgataaaggcggtggtggctctggtggtggcggatcccaggtgcagctggtgcagtctggggctgaggtgaagaagcctggggcctcagtgaaggtttcctgcaaggcatctggatacaccttcaccagctacgacattaattgggtgcgacaggcccctggacaagggcttgagtggatgggagtgatcaaccctagtggtggaggtacaagctacgcacagaagttccagggcagagtcaccatgaccagggacacgtccacgagcacagtctacatggagctgagcagcctgagatctgaggacacggccgtgtattactgtgctagatattctggctatgattgggtgtttgactactggggccaagggaccctggtcaccgtctcctcaggtggaggcggttcaggcggaggtggctctggcggtggcggatcggacatccagatgacccagtctccatcctccctgtctgcatctgtaggagacagagtcaccatcacttgccgggcaagtcagggcattggcagctggttagcttggtatcagcagaaaccagggaaagcccctaagctcctgatctatgctgcatccacattgcaaagtggggtcccatcaaggttcagtggcagtggatctgggacagatttcactctcaccatcagcagtctgcaacctgaagattttgcaacttactactgtcaacagagttacagtaccccttggactttcggccctgggaccaaagtggatatcaaaaccacgacgccagcgccgcggccaccaacaccggcgcccaccatcgcgtcgcagcccctgtccctgcgcccagaggcgtgccggccagcggcggggggcgcagtgcacacgagggggctggacttcgcctgtgatatctacatctgggcgcccttggccgggacttgtggggtccttctcctgtcactggttatcaccctttactgccggagggaccagaggctgccccccgatgcccacaagccccctgggggaggcagtttccggacccccatccaagaggagcaggccgacgcccactccaccctggccaagatcagagtgaagttcagcaggagcgcagacgcccccgcgtaccagcagggccagaaccagctctataacgagctcaatctaggacgaagagaggagtacgatgttttggacaagagacgtggccgggaccctgagatggggggaaagccgagaaggaagaaccctcaggaaggcctgtacaatgaactgcagaaagataagatggcggaggcctacagtgagattgggatgaaaggcgagcgccggaggggcaaggggcacgatggcctttaccagggtctcagtacagccaccaaggacacctacgacgcccttcacatgcaggccctgccccctcgcggctctggcgagggaaggggttccctgcttacttgcggcgacgtcgaagagaatcccggtccgatggccctcccagtaactgccctccttttgcccctcgcactccttcttcatgccgctcgccccaactgggtcaacgtgattagcgatttgaagaaaatcgaggaccttatacagtctatgcatattgacgctacactgtatactgagagtgatgtacacccgtcctgtaaggtaacggccatgaaatgctttcttctggagctccaggtcatcagcttggagtctggggacgcaagcatccacgatacggttgaaaacctcatcatccttgcgaacaactctctctcatctaatggaaacgttacagagagtgggtgtaaggagtgcgaagagttggaagaaaaaaacatcaaagaatttcttcaatccttcgttcacatagtgcaaatgttcattaacacgtccactaccacacccgccccgaggccacctacgccggcaccgactatcgccagtcaacccctctctctgcgccccgaggcttgccggcctgcggctggtggggcggtccacacccggggcctggattttgcgtgcgatatatacatctgggcacctcttgccggcacctgcggagtgctgcttctctcactcgttattacgctgtactgctaa

SEQ ID NO: 192 - DNA, 2175 bp, synthetic construct
  misc_feature 1..2175: note = NK77.59_CD70_DB03_H10 construct
  source 1..2175: mol_type = other DNA
atggccttaccagtgaccgccttgctcctgccgctggccttgctgctccacgccgccaggccggactacaaagacgatgacgataaaggcggtggtggctctggtggtggcggatcccaggtgcagctggtgcagtctggggctgaggtgaagaagcctggggcctcagtgaaggtttcctgcaaggcatctggatacaccttcgctaactactatatgcactgggtgcgacaggcccctggacaagggcttgagtggatgggaataatcaaccctagtggtggtagcacaagctacgcacagaagttccagggcagagtcaccatgaccagggacacgtccacgagcacagtctacatggagctgagcagcctgagatctgaggacacggccgtgtattactgtgctagagatagcggctcctactttggttggttcgacccctggggccagggaaccctggtcaccgtctcctcaggtggaggcggttcaggcggaggtggctctggcggtggcggatcggacatccagatgacccagtctccatcctccctgtctgcatctgtaggagacagagtcaccatcacttgccgggcaagtcagagcattagcagctctttagcatggtatcagcagaaaccagggaaagcccctaagctcctgatctatgatgcatccagtttgcaaagtggggtcccatcaaggttcagtggcagtggatctgggacagatttcactctcaccatcagcagtctgcaacctgaagattttgcaacttactactgtcaacagagttacaacacccctcccactttcggcggagggaccaagctggagatcaaaaccacgacgccagcgccgcggccaccaacaccggcgcccaccatcgcgtcgcagcccctgtccctgcgcccagaggcgtgccggccagcggcggggggcgcagtgcacacgagggggctggacttcgcctgtgatatctacatctgggcgcccttggccgggacttgtggggtccttctcctgtcactggttatcaccctttactgccggagggaccagaggctgccccccgatgcccacaagccccctgggggaggcagtttccggacccccatccaagaggagcaggccgacgcccactccaccctggccaagatcagagtgaagttcagcaggagcgcagacgcccccgcgtaccagcagggccagaaccagctctataacgagctcaatctaggacgaagagaggagtacgatgttttggacaagagacgtggccgggaccctgagatggggggaaagccgagaaggaagaaccctcaggaaggcctgtacaatgaactgcagaaagataagatggcggaggcctacagtgagattgggatgaaaggcgagcgccggaggggcaaggggcacgatggcctttaccagggtctcagtacagccaccaaggacacctacgacgcccttcacatgcaggccctgccccctcgcggctctggcgagggaaggggttccctgcttacttgcggcgacgtcgaagagaatcccggtccgatggccctcccagtaactgccctccttttgcccctcgcactccttcttcatgccgctcgccccaactgggtcaacgtgattagcgatttgaagaaaatcgaggaccttatacagtctatgcatattgacgctacactgtatactgagagtgatgtacacccgtcctgtaaggtaacggccatgaaatgctttcttctggagctccaggtcatcagcttggagtctggggacgcaagcatccacgatacggttgaaaacctcatcatccttgcgaacaactctctctcatctaatggaaacgttacagagagtgggtgtaaggagtgcgaagagttggaagaaaaaaacatcaaagaatttcttcaatccttcgttcacatagtgcaaatgttcattaacacgtccactaccacacccgccccgaggccacctacgccggcaccgactatcgccagtcaacccctctctctgcgccccgaggcttgccggcctgcggctggtggggcggtccacacccggggcctggattttgcgtgcgatatatacatctgggcacctcttgccggcacctgcggagtgctgcttctctcactcgttattacgctgtactgctaa

SEQ ID NO: 193 - DNA, 2175 bp, synthetic construct
  misc_feature 1..2175: note = NK77.60_CD70_DB04_A05 construct
  source 1..2175: mol_type = other DNA
atggccttaccagtgaccgccttgctcctgccgctggccttgctgctccacgccgccaggccggactacaaagacgatgacgataaaggcggtggtggctctggtggtggcggatcccaggtgcagctggtgcagtctggggctgaggtgaagaagcctggggcctcagtgaaggtttcctgcaaggcatctggatacaccttcaccacatactatatgcactgggtgcgacaggcccctggacaagggcttgagtggatgggaataatcaaccctaccggcggtagcacatactacgcacagaagttccagggcagagtcaccatgaccagggacacgtccacgagcacagtctacatggagctgagcagcctgagatctgaggacacggccgtgtattactgtgctagagacagcgggaactatcaagggatctttgactactggggccaagggaccctggtcaccgtctcctcaggtggaggcggttcaggcggaggtggctctggcggtggcggatcggacatccagatgacccagtctccatcctccctgtctgcatctgtaggagacagagtcaccatcacttgccgggcaagtcaggggattggcggctatttagcctggtatcagcagaaaccagggaaagcccctaagctcctgatctatgatgcatccaatttggagaccggggtcccatcaaggttcagtggcagtggatctgggacagatttcactctcaccatcagcagtctgcaacctgaagattttgcaacttactactgtcaacagagttacgactcccctcccaccttcggccaagggacacgactggagattaaaaccacgacgccagcgccgcggccaccaacaccggcgcccaccatcgcgtcgcagcccctgtccctgcgcccagaggcgtgccggccagcggcggggggcgcagtgcacacgagggggctggacttcgcctgtgatatctacatctgggcgcccttggccgggacttgtggggtccttctcctgtcactggttatcaccctttactgccggagggaccagaggctgccccccgatgcccacaagccccctgggggaggcagtttccggacccccatccaagaggagcaggccgacgcccactccaccctggccaagatcagagtgaagttcagcaggagcgcagacgcccccgcgtaccagcagggccagaaccagctctataacgagctcaatctaggacgaagagaggagtacgatgttttggacaagagacgtggccgggaccctgagatggggggaaagccgagaaggaagaaccctcaggaaggcctgtacaatgaactgcagaaagataagatggcggaggcctacagtgagattgggatgaaaggcgagcgccggaggggcaaggggcacgatggcctttaccagggtctcagtacagccaccaaggacacctacgacgcccttcacatgcaggccctgccccctcgcggctctggcgagggaaggggttccctgcttacttgcggcgacgtcgaagagaatcccggtccgatggccctcccagtaactgccctccttttgcccctcgcactccttcttcatgccgctcgccccaactgggtcaacgtgattagcgatttgaagaaaatcgaggaccttatacagtctatgcatattgacgctacactgtatactgagagtgatgtacacccgtcctgtaaggtaacggccatgaaatgctttcttctggagctccaggtcatcagcttggagtctggggacgcaagcatccacgatacggttgaaaacctcatcatccttgcgaacaactctctctcatctaatggaaacgttacagagagtgggtgtaaggagtgcgaagagttggaagaaaaaaacatcaaagaatttcttcaatccttcgttcacatagtgcaaatgttcattaacacgtccactaccacacccgccccgaggccacctacgccggcaccgactatcgccagtcaacccctctctctgcgccccgaggcttgccggcctgcggctggtggggcggtccacacccggggcctggattttgcgtgcgatatatacatctgggcacctcttgccggcacctgcggagtgctgcttctctcactcgttattacgctgtactgctaa

SEQ ID NO: 194 - DNA, 2172 bp, synthetic construct
  misc_feature 1..2172: note = NK77.61_CD70_DB04_A07 construct
  source 1..2172: mol_type = other DNA
atggccttaccagtgaccgccttgctcctgccgctggccttgctgctccacgccgccaggccggactacaaagacgatgacgataaaggcggtggtggctctggtggtggcggatcccaggtgcagctggtgcagtctggggctgaggtgaagaagcctggggcctcagtgaaggtttcctgcaaggcatctggaaataccttcaccagctactatatgcactgggtgcgacaggcccctggacaagggcttgagtggatgggatggatcaaccccaacagtggtgacacaaattacgcacagaacttccagggcagagtcaccatgaccagggacacgtccacgagcacagtctacatggagctgagcagcctgagatctgaggacacggccgtgtattactgtgctagaggtgtcagcggttacgatctatttgactactggggccaagggaccctggtcaccgtctcctcaggtggaggcggttcaggcggaggtggctctggcggtggcggatcggacatccagatgacccagtctccatcctccctgtctgcatctgtaggagacagagtcaccatcacttgccgggcaagtcagagcgtgagcagctatttaaattggtatcagcagaaaccagggaaagcccctaagctcctgatctatgatacgtccaacttggagacgggggtcccatcaaggttcagtggcagtggatctgggacagatttcactctcaccatcagcagtctgcaacctgaagattttgcaacttactactgtcaacaggctcatagttttcctctcactttcggcggagggaccaaggtggagatcaaaaccacgacgccagcgccgcggccaccaacaccggcgcccaccatcgcgtcgcagcccctgtccctgcgcccagaggcgtgccggccagcggcggggggcgcagtgcacacgagggggctggacttcgcctgtgatatctacatctgggcgcccttggccgggacttgtggggtccttctcctgtcactggttatcaccctttactgccggagggaccagaggctgccccccgatgcccacaagccccctgggggaggcagtttccggacccccatccaagaggagcaggccgacgcccactccaccctggccaagatcagagtgaagttcagcaggagcgcagacgcccccgcgtaccagcagggccagaaccagctctataacgagctcaatctaggacgaagagaggagtacgatgttttggacaagagacgtggccgggaccctgagatggggggaaagccgagaaggaagaaccctcaggaaggcctgtacaatgaactgcagaaagataagatggcggaggcctacagtgagattgggatgaaaggcgagcgccggaggggcaaggggcacgatggcctttaccagggtctcagtacagccaccaaggacacctacgacgcccttcacatgcaggccctgccccctcgcggctctggcgagggaaggggttccctgcttacttgcggcgacgtcgaagagaatcccggtccgatggccctcccagtaactgccctccttttgcccctcgcactccttcttcatgccgctcgccccaactgggtcaacgtgattagcgatttgaagaaaatcgaggaccttatacagtctatgcatattgacgctacactgtatactgagagtgatgtacacccgtcctgtaaggtaacggccatgaaatgctttcttctggagctccaggtcatcagcttggagtctggggacgcaagcatccacgatacggttgaaaacctcatcatccttgcgaacaactctctctcatctaatggaaacgttacagagagtgggtgtaaggagtgcgaagagttggaagaaaaaaacatcaaagaatttcttcaatccttcgttcacatagtgcaaatgttcattaacacgtccactaccacacccgccccgaggccacctacgccggcaccgactatcgccagtcaacccctctctctgcgccccgaggcttgccggcctgcggctggtggggcggtccacacccggggcctggattttgcgtgcgatatatacatctgggcacctcttgccggcacctgcggagtgctgcttctctcactcgttattacgctgtactgctaa

SEQ ID NO: 195 - DNA, 2172 bp, synthetic construct
  misc_feature 1..2172: note = NK77.62_CD70_DB04_A10 construct
  source 1..2172: mol_type = other DNA
atggccttaccagtgaccgccttgctcctgccgctggccttgctgctccacgccgccaggccggactacaaagacgatgacgataaaggcggtggtggctctggtggtggcggatccgaggtgcagctggtggagtctgggggaggcttggtcaagcctggggggtccctgagactctcctgtgcagcgtctggattcaccttcagtagctatggcatgcactgggtccgccaggctccaggcaaggggctggagtgggtggcatcgataaaacatgatggaagtgagcaatactatgttgactccgtgaagggccgattcaccatctccagagacgattccaagaacacgctgtatctgcaaatgaacagcctgaaaacggaggacacggctgtgtattactgtgcggctagtggagtggatgtctggggccaagggacaaccgtcaccgtctcttcaggtggaggcggttcaggcggaggtggctctggcggtggcggatcggatattgtgatgactcagtctccactctccctgcccgtcacccctggagagccggcctccatctcctgcaggtctagtcagagcctcctgcacagcaatggctacaactatttggattggtacctgcagaagccagggcagtctccacagctcctgatctatttgggttctacccgggcctccggggtccctgacaggttcagtggcagtggatcaggcacagattttacactgaaaatcagcagagtggaggctgaggatgttggggtttattactgcatgcaagctctagatactcctctcactttcggcggagggaccaagttagagatcaaaaccacgacgccagcgccgcggccaccaacaccggcgcccaccatcgcgtcgcagcccctgtccctgcgcccagaggcgtgccggccagcggcggggggcgcagtgcacacgagggggctggacttcgcctgtgatatctacatctgggcgcccttggccgggacttgtggggtccttctcctgtcactggttatcaccctttactgccggagggaccagaggctgccccccgatgcccacaagccccctgggggaggcagtttccggacccccatccaagaggagcaggccgacgcccactccaccctggccaagatcagagtgaagttcagcaggagcgcagacgcccccgcgtaccagcagggccagaaccagctctataacgagctcaatctaggacgaagagaggagtacgatgttttggacaagagacgtggccgggaccctgagatggggggaaagccgagaaggaagaaccctcaggaaggcctgtacaatgaactgcagaaagataagatggcggaggcctacagtgagattgggatgaaaggcgagcgccggaggggcaaggggcacgatggcctttaccagggtctcagtacagccaccaaggacacctacgacgcccttcacatgcaggccctgccccctcgcggctctggcgagggaaggggttccctgcttacttgcggcgacgtcgaagagaatcccggtccgatggccctcccagtaactgccctccttttgcccctcgcactccttcttcatgccgctcgccccaactgggtcaacgtgattagcgatttgaagaaaatcgaggaccttatacagtctatgcatattgacgctacactgtatactgagagtgatgtacacccgtcctgtaaggtaacggccatgaaatgctttcttctggagctccaggtcatcagcttggagtctggggacgcaagcatccacgatacggttgaaaacctcatcatccttgcgaacaactctctctcatctaatggaaacgttacagagagtgggtgtaaggagtgcgaagagttggaagaaaaaaacatcaaagaatttcttcaatccttcgttcacatagtgcaaatgttcattaacacgtccactaccacacccgccccgaggccacctacgccggcaccgactatcgccagtcaacccctctctctgcgccccgaggcttgccggcctgcggctggtggggcggtccacacccggggcctggattttgcgtgcgatatatacatctgggcacctcttgccggcacctgcggagtgctgcttctctcactcgttattacgctgtactgctaa

SEQ ID NO: 196 - DNA, 2181 bp, synthetic construct
  misc_feature 1..2181: note = NK77.63_CD70_DB04_A11 construct
  source 1..2181: mol_type = other DNA
atggccttaccagtgaccgccttgctcctgccgctggccttgctgctccacgccgccaggccggactacaaagacgatgacgataaaggcggtggtggctctggtggtggcggatcccaggtgcagctggtgcagtctggggctgaggtgaagaagcctggggcctcagtgaaggtttcctgcaaggcatctggaggtaccttcagtcgttacgacattaattgggtgcgacaggcccctggacaagggcttgagtgggtgggaataatcgatcctacaggtgcgtcaacaagctacgcacagaagttccagggcagagtcaccatgaccagggacacgtccacgagcacagtctacatggagctgagcagcctgagatctgaggacacggccgtgtattactgtgctagagattacagttacgggatggattattatggcatggacgtctggggccaagggaccctggtcaccgtctcctcaggtggaggcggttcaggcggaggtggctctggcggtggcggatcggacatccagatgacccagtctccatcctccctgtctgcatctgtaggagacagagtcaccatcacttgccaggcgagtcaggacattagcaactatttaaattggtatcagcagaaaccagggaaagcccctaagctcctgatctacgatacctccaatttgcagacaggggtcccatcaaggttcagtggaagtggatctgggacagattttactcttaccatcagcagcctgcagcctgaagattttgcaacatattacctgagcacagatctgcagaccaccgctcacttcggccaagggaccaaggtggaaatcaaaaccacgacgccagcgccgcggccaccaacaccggcgcccaccatcgcgtcgcagcccctgtccctgcgcccagaggcgtgccggccagcggcggggggcgcagtgcacacgagggggctggacttcgcctgtgatatctacatctgggcgcccttggccgggacttgtggggtccttctcctgtcactggttatcaccctttactgccggagggaccagaggctgccccccgatgcccacaagccccctgggggaggcagtttccggacccccatccaagaggagcaggccgacgcccactccaccctggccaagatcagagtgaagttcagcaggagcgcagacgcccccgcgtaccagcagggccagaaccagctctataacgagctcaatctaggacgaagagaggagtacgatgttttggacaagagacgtggccgggaccctgagatggggggaaagccgagaaggaagaaccctcaggaaggcctgtacaatgaactgcagaaagataagatggcggaggcctacagtgagattgggatgaaaggcgagcgccggaggggcaaggggcacgatggcctttaccagggtctcagtacagccaccaaggacacctacgacgcccttcacatgcaggccctgccccctcgcggctctggcgagggaaggggttccctgcttacttgcggcgacgtcgaagagaatcccggtccgatggccctcccagtaactgccctccttttgcccctcgcactccttcttcatgccgctcgccccaactgggtcaacgtgattagcgatttgaagaaaatcgaggaccttatacagtctatgcatattgacgctacactgtatactgagagtgatgtacacccgtcctgtaaggtaacggccatgaaatgctttcttctggagctccaggtcatcagcttggagtctggggacgcaagcatccacgatacggttgaaaacctcatcatccttgcgaacaactctctctcatctaatggaaacgttacagagagtgggtgtaaggagtgcgaagagttggaagaaaaaaacatcaaagaatttcttcaatccttcgttcacatagtgcaaatgttcattaacacgtccactaccacacccgccccgaggccacctacgccggcaccgactatcgccagtcaacccctctctctgcgccccgaggcttgccggcctgcggctggtggggcggtccacacccggggcctggattttgcgtgcgatatatacatctgggcacctcttgccggcacctgcggagtgctgcttctctcactcgttattacgctgtactgctaa

SEQ ID NO: 197 - DNA, 2187 bp, synthetic construct
  misc_feature 1..2187: note = NK77.64_CD70_DB04_B03 construct
  source 1..2187: mol_type = other DNA
atggccttaccagtgaccgccttgctcctgccgctggccttgctgctccacgccgccaggccggactacaaagacgatgacgataaaggcggtggtggctctggtggtggcggatcccaggtgcagctggtgcagtctggggctgaggtgaagaagcctgggtcctcggtgaaggtctcctgcaaggcttctggatacaccttcaccagctatggaatcagctgggtgcgacaggcccctggacaagggcttgagtggatgggaggtatcatccctatctttggtacaacgaactacgcacagaagttccagggcagagtcacgattaccgcggacgaatccacgagcacagcctacatggagctgagcagcctgagatctgaggacacggccgtgtattactgtgcgagagatcatagcggcgatgggtacttcgatctctggggccgtggcaccctggtcactgtctcctcaggtggaggcggttcaggcggaggtggctctggcggtggcggatcggatattgtgatgactcagtctccactctccctgcccgtcacccctggagagccggcctccatctcctgcaggtctagtcagagcctcctgcactccaacggatacaactatttggattggtacctgcagaagccagggcagtctccacagctcctgatctatgatgcctcttcacttcagtccggggtccctgacaggttcagtggcagtggatcaggcacagattttacactgaaaatcagcagagtggaggctgaggatgttggggtttattactgcatgcaaggaacacactggcctcccacgttcggccaagggaccaaggtggaaatcaaaaccacgacgccagcgccgcggccaccaacaccggcgcccaccatcgcgtcgcagcccctgtccctgcgcccagaggcgtgccggccagcggcggggggcgcagtgcacacgagggggctggacttcgcctgtgatatctacatctgggcgcccttggccgggacttgtggggtccttctcctgtcactggttatcaccctttactgccggagggaccagaggctgccccccgatgcccacaagccccctgggggaggcagtttccggacccccatccaagaggagcaggccgacgcccactccaccctggccaagatcagagtgaagttcagcaggagcgcagacgcccccgcgtaccagcagggccagaaccagctctataacgagctcaatctaggacgaagagaggagtacgatgttttggacaagagacgtggccgggaccctgagatggggggaaagccgagaaggaagaaccctcaggaaggcctgtacaatgaactgcagaaagataagatggcggaggcctacagtgagattgggatgaaaggcgagcgccggaggggcaaggggcacgatggcctttaccagggtctcagtacagccaccaaggacacctacgacgcccttcacatgcaggccctgccccctcgcggctctggcgagggaaggggttccctgcttacttgcggcgacgtcgaagagaatcccggtccgatggccctcccagtaactgccctccttttgcccctcgcactccttcttcatgccgctcgccccaactgggtcaacgtgattagcgatttgaagaaaatcgaggaccttatacagtctatgcatattgacgctacactgtatactgagagtgatgtacacccgtcctgtaaggtaacggccatgaaatgctttcttctggagctccaggtcatcagcttggagtctggggacgcaagcatccacgatacggttgaaaacctcatcatccttgcgaacaactctctctcatctaatggaaacgttacagagagtgggtgtaaggagtgcgaagagttggaagaaaaaaacatcaaagaatttcttcaatccttcgttcacatagtgcaaatgttcattaacacgtccactaccacacccgccccgaggccacctacgccggcaccgactatcgccagtcaacccctctctctgcgccccgaggcttgccggcctgcggctggtggggcggtccacacccggggcctggattttgcgtgcgatatatacatctgggcacctcttgccggcacctgcggagtgctgcttctctcactcgttattacgctgtactgctaa

SEQ ID NO: 198 - DNA, 2169 bp, synthetic construct
  misc_feature 1..2169: note = NK77.65_CD70_DB04_B05 construct
  source 1..2169: mol_type = other DNA
atggccttaccagtgaccgccttgctcctgccgctggccttgctgctccacgccgccaggccggactacaaagacgatgacgataaaggcggtggtggctctggtggtggcggatcccaggtgcagctggtgcagtctggggctgaggtgaagaagcctggggcctcagtgaaggtctcctgcaaggcttctggatacaccttcaccgagaatgagatgcactgggtgcgacaggcccctggacaagggcttgagtggatgggatggatcaacccgaacagtggtggcacaaactatgcacagaagtttcagggcagggtcaccatgaccagggacacgtccactagcacagtgtacatggagctgagctctctgagatctgaagacacggccgtgtattactgtgcggggagctggggtggttactactttgactactggggccaagggaccctggtcaccgtctcctcaggtggaggcggttcaggcggaggtggctctggcggtggcggatcggacatccagatgacccagtctccatcctccctgtctgcatctgtaggagacagagtcaccatcacttgccgggcaagtcagagcgttagcagatatttaaattggtatcagcagaaaccagggaaagcccctaagctcctgatctatgatgcatccaatttggaaaccggggtcccatcaaggttcagtggcagtggatctgggacagatttcactctcaccatcagcagtctgcaacctgaagattttgcaacttactactgtcaacaggccgacagtttccctgtgacttttggccaggggaccaagctggagatcaaaaccacgacgccagcgccgcggccaccaacaccggcgcccaccatcgcgtcgcagcccctgtccctgcgcccagaggcgtgccggccagcggcggggggcgcagtgcacacgagggggctggacttcgcctgtgatatctacatctgggcgcccttggccgggacttgtggggtccttctcctgtcactggttatcaccctttactgccggagggaccagaggctgccccccgatgcccacaagccccctgggggaggcagtttccggacccccatccaagaggagcaggccgacgcccactccaccctggccaagatcagagtgaagttcagcaggagcgcagacgcccccgcgtaccagcagggccagaaccagctctataacgagctcaatctaggacgaagagaggagtacgatgttttggacaagagacgtggccgggaccctgagatggggggaaagccgagaaggaagaaccctcaggaaggcctgtacaatgaactgcagaaagataagatggcggaggcctacagtgagattgggatgaaaggcgagcgccggaggggcaaggggcacgatggcctttaccagggtctcagtacagccaccaaggacacctacgacgcccttcacatgcaggccctgccccctcgcggctctggcgagggaaggggttccctgcttacttgcggcgacgtcgaagagaatcccggtccgatggccctcccagtaactgccctccttttgcccctcgcactccttcttcatgccgctcgccccaactgggtcaacgtgattagcgatttgaagaaaatcgaggaccttatacagtctatgcatattgacgctacactgtatactgagagtgatgtacacccgtcctgtaaggtaacggccatgaaatgctttcttctggagctccaggtcatcagcttggagtctggggacgcaagcatccacgatacggttgaaaacctcatcatccttgcgaacaactctctctcatctaatggaaacgttacagagagtgggtgtaaggagtgcgaagagttggaagaaaaaaacatcaaagaatttcttcaatccttcgttcacatagtgcaaatgttcattaacacgtccactaccacacccgccccgaggccacctacgccggcaccgactatcgccagtcaacccctctctctgcgccccgaggcttgccggcctgcggctggtggggcggtccacacccggggcctggattttgcgtgcgatatatacatctgggcacctcttgccggcacctgcggagtgctgcttctctcactcgttattacgctgtactgctaa

SEQ ID NO: 199 - DNA, 2178 bp, synthetic construct
  misc_feature 1..2178: note = NK77.66_CD70_DB04_B07 construct
  source 1..2178: mol_type = other DNA
atggccttaccagtgaccgccttgctcctgccgctggccttgctgctccacgccgccaggccggactacaaagacgatgacgataaaggcggtggtggctctggtggtggcggatcccaggtgcagctggtgcagtctggggctgaggtgaagaagcctggggcctcagtgaaggtttcctgcaaggcatctggatacaccttcaccaactactatatctactgggtgcgacaggcccctggacaagggcttgagtggatgggatggatcaaccccaatgacggtgcaacaaattacgcacagaagttccagggcagagtcaccatgaccagggacacgtccacgagcacagtctacatggagctgagcagcctgagatctgaggacacggccgtgtattactgtgctagagaaggcaacgattactattattatttcatggactactggggccaagggaccctggtcaccgtctcctcaggtggaggcggttcaggcggaggtggctctggcggtggcggatcggacatccagatgacccagtctccatcctccctgtctgcatctgtaggagacagagtcaccatcacttgccgggcaagtcagggcattagcaacaatttaaattggtatcagcagaaaccagggaaagcccctaagctcctgatctatcatgcatccaacttggagacgggggtcccatcaaggttcagtggcagtggatctgggacagatttcactctcaccatcagcagtctgcaacctgaagattttgcaacttactactgtcaacagagttacgacggccctatgacttttggccaggggaccaagctggagatcaaaaccacgacgccagcgccgcggccaccaacaccggcgcccaccatcgcgtcgcagcccctgtccctgcgcccagaggcgtgccggccagcggcggggggcgcagtgcacacgagggggctggacttcgcctgtgatatctacatctgggcgcccttggccgggacttgtggggtccttctcctgtcactggttatcaccctttactgccggagggaccagaggctgccccccgatgcccacaagccccctgggggaggcagtttccggacccccatccaagaggagcaggccgacgcccactccaccctggccaagatcagagtgaagttcagcaggagcgcagacgcccccgcgtaccagcagggccagaaccagctctataacgagctcaatctaggacgaagagaggagtacgatgttttggacaagagacgtggccgggaccctgagatggggggaaagccgagaaggaagaaccctcaggaaggcctgtacaatgaactgcagaaagataagatggcggaggcctacagtgagattgggatgaaaggcgagcgccggaggggcaaggggcacgatggcctttaccagggtctcagtacagccaccaaggacacctacgacgcccttcacatgcaggccctgccccctcgcggctctggcgagggaaggggttccctgcttacttgcggcgacgtcgaagagaatcccggtccgatggccctcccagtaactgccctccttttgcccctcgcactccttcttcatgccgctcgccccaactgggtcaacgtgattagcgatttgaagaaaatcgaggaccttatacagtctatgcatattgacgctacactgtatactgagagtgatgtacacccgtcctgtaaggtaacggccatgaaatgctttcttctggagctccaggtcatcagcttggagtctggggacgcaagcatccacgatacggttgaaaacctcatcatccttgcgaacaactctctctcatctaatggaaacgttacagagagtgggtgtaaggagtgcgaagagttggaagaaaaaaacatcaaagaatttcttcaatccttcgttcacatagtgcaaatgttcattaacacgtccactaccacacccgccccgaggccacctacgccggcaccgactatcgccagtcaacccctctctctgcgccccgaggcttgccggcctgcggctggtggggcggtccacacccggggcctggattttgcgtgcgatatatacatctgggcacctcttgccggcacctgcggagtgctgcttctctcactcgttattacgctgtactgctaa

SEQ ID NO: 200 - DNA, 2196 bp, synthetic construct
  misc_feature 1..2196: note = NK77.67_CD70_DB04_C01 construct
  source 1..2196: mol_type = other DNA
atggccttaccagtgaccgccttgctcctgccgctggccttgctgctccacgccgccaggccggactacaaagacgatgacgataaaggcggtggtggctctggtggtggcggatcccaggtgcagctggtgcagtctggggctgaggtgaagaagcctgggtcctcggtgaaggtctcctgcaaggcttctggaggcaccttcagcagctatgctatcagctgggtgcgacaggcccctggacaagggcttgagtggatgggaggaatcacaccaatgtttggtacaacggactacgcacagaagttccagggcagagtcacgattaccgcggacgaatccacgagcacagcctacatggagctgagcagcctgagatctgaggacacggccgtgtattactgtgcgagagatgagcgggacggatacgccacagtggcttttgatatctggggccaagggacaatggtcaccgtctcttcaggtggaggcggttcaggcggaggtggctctggcggtggcggatcggatattgtgatgactcagtctccactctccctgcccgtcacccctggagagccggcctccatctcctgcaggtctagtcagagcctcctgcatagcaatggatacaactatttggattggtacctgcagaagccagggcagtctccacagctcctgatctatgatgcttctaatcttgagacaggggtccctgacaggttcagtggcagtggatcaggcacagattttacactgaaaatcagcagagtggaggctgaggatgttggggtttattactgcatgcaagggacgcattggcctcccacgttcggccaagggaccaaggtggaaatcaaaaccacgacgccagcgccgcggccaccaacaccggcgcccaccatcgcgtcgcagcccctgtccctgcgcccagaggcgtgccggccagcggcggggggcgcagtgcacacgagggggctggacttcgcctgtgatatctacatctgggcgcccttggccgggacttgtggggtccttctcctgtcactggttatcaccctttactgccggagggaccagaggctgccccccgatgcccacaagccccctgggggaggcagtttccggacccccatccaagaggagcaggccgacgcccactccaccctggccaagatcagagtgaagttcagcaggagcgcagacgcccccgcgtaccagcagggccagaaccagctctataacgagctcaatctaggacgaagagaggagtacgatgttttggacaagagacgtggccgggaccctgagatggggggaaagccgagaaggaagaaccctcaggaaggcctgtacaatgaactgcagaaagataagatggcggaggcctacagtgagattgggatgaaaggcgagcgccggaggggcaaggggcacgatggcctttaccagggtctcagtacagccaccaaggacacctacgacgcccttcacatgcaggccctgccccctcgcggctctggcgagggaaggggttccctgcttacttgcggcgacgtcgaagagaatcccggtccgatggccctcccagtaactgccctccttttgcccctcgcactccttcttcatgccgctcgccccaactgggtcaacgtgattagcgatttgaagaaaatcgaggaccttatacagtctatgcatattgacgctacactgtatactgagagtgatgtacacccgtcctgtaaggtaacggccatgaaatgctttcttctggagctccaggtcatcagcttggagtctggggacgcaagcatccacgatacggttgaaaacctcatcatccttgcgaacaactctctctcatctaatggaaacgttacagagagtgggtgtaaggagtgcgaagagttggaagaaaaaaacatcaaagaatttcttcaatccttcgttcacatagtgcaaatgttcattaacacgtccactaccacacccgccccgaggccacctacgccggcaccgactatcgccagtcaacccctctctctgcgccccgaggcttgccggcctgcggctggtggggcggtccacacccggggcctggattttgcgtgcgatatatacatctgggcacctcttgccggcacctgcggagtgctgcttctctcactcgttattacgctgtactgctaa

SEQ ID NO: 201 - DNA, 2181 bp, synthetic construct
  misc_feature 1..2181: note = NK77.68_CD70_DB04_C04 construct
  source 1..2181: mol_type = other DNA
atggccttaccagtgaccgccttgctcctgccgctggccttgctgctccacgccgccaggccggactacaaagacgatgacgataaaggcggtggtggctctggtggtggcggatcccaggtgcagctggtgcagtctggggctgaggtgaagaagcctggggcctcagtgaaggtttcctgcaaggcatctggatacaccttcaccagctactatatgcactgggtgcgacaggcccctggacaagggcttgagtggatgggaataatcaaccctagtgacggaggaacaagctacgcagacaagttccagggcagagtcaccatgaccagggacacgtccacgagcacagtctacatggagctgagcagcctgagatctgaggacacggccgtgtattactgtgctagagcgcttgcccccctgggatggggtgacggcatggatgtctggggccaagggacaacagtcaccgtctcttcaggtggaggcggttcaggcggaggtggctctggcggtggcggatcggacatccagatgacccagtctccatcctccctgtctgcatctgtaggagacagagtcaccatcacttgccaggcgagtcaggacattagcaactatttaaattggtatcagcagaaaccagggaaagcccctaagctcctgatctacgatgcatccaatttggaaacaggggtcccatcaaggttcagtggaagtggatctgggacagattttactctcaccatcagcagcctgcagcctgaagatttcgcaacatattactgtcaacagtcatatgatggacctatcaccttcggccaagggacacgactggagattaaaaccacgacgccagcgccgcggccaccaacaccggcgcccaccatcgcgtcgcagcccctgtccctgcgcccagaggcgtgccggccagcggcggggggcgcagtgcacacgagggggctggacttcgcctgtgatatctacatctgggcgcccttggccgggacttgtggggtccttctcctgtcactggttatcaccctttactgccggagggaccagaggctgccccccgatgcccacaagccccctgggggaggcagtttccggacccccatccaagaggagcaggccgacgcccactccaccctggccaagatcagagtgaagttcagcaggagcgcagacgcccccgcgtaccagcagggccagaaccagctctataacgagctcaatctaggacgaagagaggagtacgatgttttggacaagagacgtggccgggaccctgagatggggggaaagccgagaaggaagaaccctcaggaaggcctgtacaatgaactgcagaaagataagatggcggaggcctacagtgagattgggatgaaaggcgagcgccggaggggcaaggggcacgatggcctttaccagggtctcagtacagccaccaaggacacctacgacgcccttcacatgcaggccctgccccctcgcggctctggcgagggaaggggttccctgcttacttgcggcgacgtcgaagagaatcccggtccgatggccctcccagtaactgccctccttttgcccctcgcactccttcttcatgccgctcgccccaactgggtcaacgtgattagcgatttgaagaaaatcgaggaccttatacagtctatgcatattgacgctacactgtatactgagagtgatgtacacccgtcctgtaaggtaacggccatgaaatgctttcttctggagctccaggtcatcagcttggagtctggggacgcaagcatccacgatacggttgaaaacctcatcatccttgcgaacaactctctctcatctaatggaaacgttacagagagtgggtgtaaggagtgcgaagagttggaagaaaaaaacatcaaagaatttcttcaatccttcgttcacatagtgcaaatgttcattaacacgtccactaccacacccgccccgaggccacctacgccggcaccgactatcgccagtcaacccctctctctgcgccccgaggcttgccggcctgcggctggtggggcggtccacacccggggcctggattttgcgtgcgatatatacatctgggcacctcttgccggcacctgcggagtgctgcttctctcactcgttattacgctgtactgctaa

SEQ ID NO: 202 - DNA, 2172 bp, synthetic construct
  misc_feature 1..2172: note = NK77.69_CD70_DB04_C06 construct
  source 1..2172: mol_type = other DNA
atggccttaccagtgaccgccttgctcctgccgctggccttgctgctccacgccgccaggccggactacaaagacgatgacgataaaggcggtggtggctctggtggtggcggatcccaggtgcagctggtgcagtctggggctgaggtgaagaagcctgggtcctcggtgaaggtctcctgcaaggcttctggatacaccttcactagctattacatccactgggtgcgacaggcccctggacaagggcttgagtggatgggatggatgaatccctcctcaggtgttacgaacttcgcacagaagttccagggcagagtcacgattaccgcggacgaatccacgagcacagcctacatggagctgagcagcctgagatctgaggacacggccgtgtattactgtgcgagaggttcggaccagggtgactggtctgacccctggggccagggaaccctggtcaccgtctcctcaggtggaggcggttcaggcggaggtggctctggcggtggcggatcggacatccagatgacccagtctccatcctccctgtctgcatctgtaggagacagagtcaccatcacttgccgggcaagtcagagcattagcagctatttaaattggtatcagcagaaaccagggaaagcccctaagctcctgatctatgacgcatccaacttggaaacgggggtcccatcaaggttcagtggcagtggatctgggacagatttcactctcaccatcagcagtctgcaacctgaagattttgcaacttactactgtcaacagagttacaatacccctccaactttcggcggagggaccaaggtggagatcaaaaccacgacgccagcgccgcggccaccaacaccggcgcccaccatcgcgtcgcagcccctgtccctgcgcccagaggcgtgccggccagcggcggggggcgcagtgcacacgagggggctggacttcgcctgtgatatctacatctgggcgcccttggccgggacttgtggggtccttctcctgtcactggttatcaccctttactgccggagggaccagaggctgccccccgatgcccacaagccccctgggggaggcagtttccggacccccatccaagaggagcaggccgacgcccactccaccctggccaagatcagagtgaagttcagcaggagcgcagacgcccccgcgtaccagcagggccagaaccagctctataacgagctcaatctaggacgaagagaggagtacgatgttttggacaagagacgtggccgggaccctgagatggggggaaagccgagaaggaagaaccctcaggaaggcctgtacaatgaactgcagaaagataagatggcggaggcctacagtgagattgggatgaaaggcgagcgccggaggggcaaggggcacgatggcctttaccagggtctcagtacagccaccaaggacacctacgacgcccttcacatgcaggccctgccccctcgcggctctggcgagggaaggggttccctgcttacttgcggcgacgtcgaagagaatcccggtccgatggccctcccagtaactgccctccttttgcccctcgcactccttcttcatgccgctcgccccaactgggtcaacgtgattagcgatttgaagaaaatcgaggaccttatacagtctatgcatattgacgctacactgtatactgagagtgatgtacacccgtcctgtaaggtaacggccatgaaatgctttcttctggagctccaggtcatcagcttggagtctggggacgcaagcatccacgatacggttgaaaacctcatcatccttgcgaacaactctctctcatctaatggaaacgttacagagagtgggtgtaaggagtgcgaagagttggaagaaaaaaacatcaaagaatttcttcaatccttcgttcacatagtgcaaatgttcattaacacgtccactaccacacccgccccgaggccacctacgccggcaccgactatcgccagtcaacccctctctctgcgccccgaggcttgccggcctgcggctggtggggcggtccacacccggggcctggattttgcgtgcgatatatacatctgggcacctcttgccggcacctgcggagtgctgcttctctcactcgttattacgctgtactgctaa

SEQ ID NO: 203 - DNA, 2181 bp, synthetic construct
  misc_feature 1..2181: note = NK77.70_CD70_DB04_C07 construct
  source 1..2181: mol_type = other DNA
atggccttaccagtgaccgccttgctcctgccgctggccttgctgctccacgccgccaggccggactacaaagacgatgacgataaaggcggtggtggctctggtggtggcggatcccaggtgcagctggtgcagtctggggctgaggtgaagaagcctggggcctcagtgaaggtttcctgcaaggcatctggatacaccttcaccgactcctatatacactgggtgcgacaggcccctggacaagggcttgagtggattggatggatgaaccctaatacaggtgacacaggctacgcacagaagttccagggcagagtcaccatgaccagggacacgtccacgagcacagtctacatggagctgagcagcctgagatctgaggacacggccgtgtattactgtgctaaggacgactttggagagcttgctccagccaccttcgacccctggggccagggaaccctggtcaccgtctcctcaggtggaggcggttcaggcggaggtggctctggcggtggcggatcggacatccagatgacccagtctccatcctccctgtctgcatctgtaggagacagagtcaccatcacttgccaggcaagtcaggacattagcaattatttaaattggtatcagcagaaaccagggaaagcccctaagctcctgatctatggtgcatccagtttgcaaagtggggtcccatcaaggttcagtggcagtggatctgggacagatttcactctcaccatcagcagtctgcaacctgaagattttgcaacttactactgtctgcaggatgcggcgacccctatcaccttcggccaagggacacgactggagattaaaaccacgacgccagcgccgcggccaccaacaccggcgcccaccatcgcgtcgcagcccctgtccctgcgcccagaggcgtgccggccagcggcggggggcgcagtgcacacgagggggctggacttcgcctgtgatatctacatctgggcgcccttggccgggacttgtggggtccttctcctgtcactggttatcaccctttactgccggagggaccagaggctgccccccgatgcccacaagccccctgggggaggcagtttccggacccccatccaagaggagcaggccgacgcccactccaccctggccaagatcagagtgaagttcagcaggagcgcagacgcccccgcgtaccagcagggccagaaccagctctataacgagctcaatctaggacgaagagaggagtacgatgttttggacaagagacgtggccgggaccctgagatggggggaaagccgagaaggaagaaccctcaggaaggcctgtacaatgaactgcagaaagataagatggcggaggcctacagtgagattgggatgaaaggcgagcgccggaggggcaaggggcacgatggcctttaccagggtctcagtacagccaccaaggacacctacgacgcccttcacatgcaggccctgccccctcgcggctctggcgagggaaggggttccctgcttacttgcggcgacgtcgaagagaatcccggtccgatggccctcccagtaactgccctccttttgcccctcgcactccttcttcatgccgctcgccccaactgggtcaacgtgattagcgatttgaagaaaatcgaggaccttatacagtctatgcatattgacgctacactgtatactgagagtgatgtacacccgtcctgtaaggtaacggccatgaaatgctttcttctggagctccaggtcatcagcttggagtctggggacgcaagcatccacgatacggttgaaaacctcatcatccttgcgaacaactctctctcatctaatggaaacgttacagagagtgggtgtaaggagtgcgaagagttggaagaaaaaaacatcaaagaatttcttcaatccttcgttcacatagtgcaaatgttcattaacacgtccactaccacacccgccccgaggccacctacgccggcaccgactatcgccagtcaacccctctctctgcgccccgaggcttgccggcctgcggctggtggggcggtccacacccggggcctggattttgcgtgcgatatatacatctgggcacctcttgccggcacctgcggagtgctgcttctctcactcgttattacgctgtactgctaa

SEQ ID NO: 204 - DNA, 2181 bp, synthetic construct
  misc_feature 1..2181: note = NK77.71_CD70_DB04_D02 construct
  source 1..2181: mol_type = other DNA
atggccttaccagtgaccgccttgctcctgccgctggccttgctgctccacgccgccaggccggactacaaagacgatgacgataaaggcggtggtggctctggtggtggcggatcccaggtgcagctggtgcagtctggggctgaggtgaagaagcctggggcctcagtgaaggtttcctgcaaggcatctggatacaccttcaccagctacgacatcaattgggtgcgacaggcccctggacaagggcttgagtggatgggagtcatcagccctagtggtggtggaacaagctacgcacagaagttccagggcagagtcaccatgaccagggacacgtccacgagcacagtctacatggagctgagcagcctgagatctgaggacacggccgtgtattactgtgctagatactacggcggcaaccccgaagggtggtacttcgatctctggggccgtggcaccctggtcactgtctcctcaggtggaggcggttcaggcggaggtggctctggcggtggcggatcggacatccagatgacccagtctccatcctccctgtctgcatctgtaggagacagagtcaccatcacttgccgggcaagtcagagcattggaaattggttagcctggtatcagcagaaaccagggaaagcccctaagctcctgatctatgacgcatccgatttggaaaccggggtcccatcaaggttcagtggcagtggatctgggacagatttcactctcaccatcagcagtctgcaacctgaagattttgcaacttactactgtcaacagagttacactaccccttggacgttcggccaagggaccaaggtggaaatcaaaaccacgacgccagcgccgcggccaccaacaccggcgcccaccatcgcgtcgcagcccctgtccctgcgcccagaggcgtgccggccagcggcggggggcgcagtgcacacgagggggctggacttcgcctgtgatatctacatctgggcgcccttggccgggacttgtggggtccttctcctgtcactggttatcaccctttactgccggagggaccagaggctgccccccgatgcccacaagccccctgggggaggcagtttccggacccccatccaagaggagcaggccgacgcccactccaccctggccaagatcagagtgaagttcagcaggagcgcagacgcccccgcgtaccagcagggccagaaccagctctataacgagctcaatctaggacgaagagaggagtacgatgttttggacaagagacgtggccgggaccctgagatggggggaaagccgagaaggaagaaccctcaggaaggcctgtacaatgaactgcagaaagataagatggcggaggcctacagtgagattgggatgaaaggcgagcgccggaggggcaaggggcacgatggcctttaccagggtctcagtacagccaccaaggacacctacgacgcccttcacatgcaggccctgccccctcgcggctctggcgagggaaggggttccctgcttacttgcggcgacgtcgaagagaatcccggtccgatggccctcccagtaactgccctccttttgcccctcgcactccttcttcatgccgctcgccccaactgggtcaacgtgattagcgatttgaagaaaatcgaggaccttatacagtctatgcatattgacgctacactgtatactgagagtgatgtacacccgtcctgtaaggtaacggccatgaaatgctttcttctggagctccaggtcatcagcttggagtctggggacgcaagcatccacgatacggttgaaaacctcatcatccttgcgaacaactctctctcatctaatggaaacgttacagagagtgggtgtaaggagtgcgaagagttggaagaaaaaaacatcaaagaatttcttcaatccttcgttcacatagtgcaaatgttcattaacacgtccactaccacacccgccccgaggccacctacgccggcaccgactatcgccagtcaacccctctctctgcgccccgaggcttgccggcctgcggctggtggggcggtccacacccggggcctggattttgcgtgcgatatatacatctgggcacctcttgccggcacctgcggagtgctgcttctctcactcgttattacgctgtactgctaa

SEQ ID NO: 205 - DNA, 2226 bp, synthetic construct
  misc_feature 1..2226: note = NK77.72_CD70_DB04_D05 construct
  source 1..2226: mol_type = other DNA
atggccttaccagtgaccgccttgctcctgccgctggccttgctgctccacgccgccaggccggactacaaagacgatgacgataaaggcggtggtggctctggtggtggcggatccgaggtgcagctgctggagtctgggggaggcctcgtccagcctgggggctccctgagactctcctgtgcagcctctggattcgttttcgatgactatgctatccactgggtccgccaggctccgggcaaggggctagagtgggtggcagcgatatcatatgatggaagtaataaatactacgcagactccgtgaagggccgattcaccatctccagagacaattccaagaacacgctgtatctgcaaatgaacagcctgagagctgaggacacggctgtgtattactgtgcgagagctccacaatattatgggagtggcaccgacccacttgaggttagatactactactacggcatggacgtgtggggccaagggaccacggtcaccgtctcctcaggtggaggcggttcaggcggaggtggctctggcggtggcggatcggatattgtgatgactcagtctccactctccctgcccgtcacccctggagagccggcctccatctcctgcaggtctagtcagagcctcttgcattctaatggctacaactatttggattggtacctgcagaagccagggcagtctccacagctcctgatctatgaagtctctaatcgggcctccggggtccctgacaggttcagtggcagtggatcaggcacagattttacactgaaaatcagcagagtggaggctgaggatgttggggtttattactgcatgaaaggcctacaaactcctctgactttcggccctgggaccaaagtggatatcaaaaccacgacgccagcgccgcggccaccaacaccggcgcccaccatcgcgtcgcagcccctgtccctgcgcccagaggcgtgccggccagcggcggggggcgcagtgcacacgagggggctggacttcgcctgtgatatctacatctgggcgcccttggccgggacttgtggggtccttctcctgtcactggttatcaccctttactgccggagggaccagaggctgccccccgatgcccacaagccccctgggggaggcagtttccggacccccatccaagaggagcaggccgacgcccactccaccctggccaagatcagagtgaagttcagcaggagcgcagacgcccccgcgtaccagcagggccagaaccagctctataacgagctcaatctaggacgaagagaggagtacgatgttttggacaagagacgtggccgggaccctgagatggggggaaagccgagaaggaagaaccctcaggaaggcctgtacaatgaactgcagaaagataagatggcggaggcctacagtgagattgggatgaaaggcgagcgccggaggggcaaggggcacgatggcctttaccagggtctcagtacagccaccaaggacacctacgacgcccttcacatgcaggccctgccccctcgcggctctggcgagggaaggggttccctgcttacttgcggcgacgtcgaagagaatcccggtccgatggccctcccagtaactgccctccttttgcccctcgcactccttcttcatgccgctcgccccaactgggtcaacgtgattagcgatttgaagaaaatcgaggaccttatacagtctatgcatattgacgctacactgtatactgagagtgatgtacacccgtcctgtaaggtaacggccatgaaatgctttcttctggagctccaggtcatcagcttggagtctggggacgcaagcatccacgatacggttgaaaacctcatcatccttgcgaacaactctctctcatctaatggaaacgttacagagagtgggtgtaaggagtgcgaagagttggaagaaaaaaacatcaaagaatttcttcaatccttcgttcacatagtgcaaatgttcattaacacgtccactaccacacccgccccgaggccacctacgccggcaccgactatcgccagtcaacccctctctctgcgccccgaggcttgccggcctgcggctggtggggcggtccacacccggggcctggattttgcgtgcgatatatacatctgggcacctcttgccggcacctgcggagtgctgcttctctcactcgttattacgctgtactgctaa

SEQ ID NO: 206 - DNA, 2181 bp, synthetic construct
  misc_feature 1..2181: note = NK77.73_CD70_DB04_D07 construct
  source 1..2181: mol_type = other DNA
atggccttaccagtgaccgccttgctcctgccgctggccttgctgctccacgccgccaggccggactacaaagacgatgacgataaaggcggtggtggctctggtggtggcggatcccaggtgcagctggtgcagtctggggctgaggtgaagaagcctgggtcctcggtgaaggtctcctgcaaggcttctggaggcaccttccgcaattatgctatcagctgggtgcgacaggcccctggacaagggcttgagtggatgggaggtatcatccctatctttggtacagcaaactacgcacagaagttccagggcagagtcacgattaccgcggacgaatccacgagcacagcctacatggagctgagcagcctgagatctgaggacacggccgtgtattactgtgcgagagatcacagtgctgggactcaccacgacgcttttgatatctggggccaagggacaatggtcaccgtctcttcaggtggaggcggttcaggcggaggtggctctggcggtggcggatcggacatccagatgacccagtctccatcctccctgtctgcatctgtaggagacagagtcaccatcacttgccgggcaagtcagggcattagcaactatttagcctggtatcagcagaaaccagggaaagcccctaagctcctgatctatgctgcatccagtttgcaaagtggggtcccatcaaggttcagtggcagtggatctgggacagatttcactctcaccatcagcagtctgcaacctgaagattttgcaacttactactgtcaacagagtcacagtacccctctcactttcggccaagggaccaaggtggagatcaaaaccacgacgccagcgccgcggccaccaacaccggcgcccaccatcgcgtcgcagcccctgtccctgcgcccagaggcgtgccggccagcggcggggggcgcagtgcacacgagggggctggacttcgcctgtgatatctacatctgggcgcccttggccgggacttgtggggtccttctcctgtcactggttatcaccctttactgccggagggaccagaggctgccccccgatgcccacaagccccctgggggaggcagtttccggacccccatccaagaggagcaggccgacgcccactccaccctggccaagatcagagtgaagttcagcaggagcgcagacgcccccgcgtaccagcagggccagaaccagctctataacgagctcaatctaggacgaagagaggagtacgatgttttggacaagagacgtggccgggaccctgagatggggggaaagccgagaaggaagaaccctcaggaaggcctgtacaatgaactgcagaaagataagatggcggaggcctacagtgagattgggatgaaaggcgagcgccggaggggcaaggggcacgatggcctttaccagggtctcagtacagccaccaaggacacctacgacgcccttcacatgcaggccctgccccctcgcggctctggcgagggaaggggttccctgcttacttgcggcgacgtcgaagagaatcccggtccgatggccctcccagtaactgccctccttttgcccctcgcactccttcttcatgccgctcgccccaactgggtcaacgtgattagcgatttgaagaaaatcgaggaccttatacagtctatgcatattgacgctacactgtatactgagagtgatgtacacccgtcctgtaaggtaacggccatgaaatgctttcttctggagctccaggtcatcagcttggagtctggggacgcaagcatccacgatacggttgaaaacctcatcatccttgcgaacaactctctctcatctaatggaaacgttacagagagtgggtgtaaggagtgcgaagagttggaagaaaaaaacatcaaagaatttcttcaatccttcgttcacatagtgcaaatgttcattaacacgtccactaccacacccgccccgaggccacctacgccggcaccgactatcgccagtcaacccctctctctgcgccccgaggcttgccggcctgcggctggtggggcggtccacacccggggcctggattttgcgtgcgatatatacatctgggcacctcttgccggcacctgcggagtgctgcttctctcactcgttattacgctgtactgctaa

SEQ ID NO: 207 - DNA, 2166 bp, synthetic construct
  misc_feature 1..2166: note = NK77.74_CD70_DB04_D08 construct
  source 1..2166: mol_type = other DNA
atggccttaccagtgaccgccttgctcctgccgctggccttgctgctccacgccgccaggccggactacaaagacgatgacgataaaggcggtggtggctctggtggtggcggatcccaggtgcagctggtgcagtctggggctgaggtgaagaagcctggggcctcagtgaaggtctcctgcaaggcttctggatacaccttcaccagttattatatccactgggtgcgacaggccccgggacaagggcttgagtggatgggatggatgaacccaaacagtggtaacgccggctatgcacagaagttccagggcagagtcaccatgaccagggatacctccacaagcacagtgtacatggagctgagcagcctgagatctgaggacacggccgtgtattactgtgcgagagagtactgggggagctttgactactggggccaagggaccctggtcaccgtctcctcaggtggaggcggttcaggcggaggtggctctggcggtggcggatcggacatccagatgacccagtctccatcctccctgtctgcatctgtaggagacagagtcaccatcacttgccgggcaagtcaggggattagcaataacttaaattggtatcagcagaaaccagggaaagcccctaagctcctgatctatgatgcatccaacttggaaactggggtcccatcaaggttcagtggcagtggatctgggacagatttcactctcaccatcagcagtctgcaacctgaagattttgcaacttactactgtcaacagagttacagtaccccttatacgttcggccaagggaccaaggtggaaatcaaaaccacgacgccagcgccgcggccaccaacaccggcgcccaccatcgcgtcgcagcccctgtccctgcgcccagaggcgtgccggccagcggcggggggcgcagtgcacacgagggggctggacttcgcctgtgatatctacatctgggcgcccttggccgggacttgtggggtccttctcctgtcactggttatcaccctttactgccggagggaccagaggctgccccccgatgcccacaagccccctgggggaggcagtttccggacccccatccaagaggagcaggccgacgcccactccaccctggccaagatcagagtgaagttcagcaggagcgcagacgcccccgcgtaccagcagggccagaaccagctctataacgagctcaatctaggacgaagagaggagtacgatgttttggacaagagacgtggccgggaccctgagatggggggaaagccgagaaggaagaaccctcaggaaggcctgtacaatgaactgcagaaagataagatggcggaggcctacagtgagattgggatgaaaggcgagcgccggaggggcaaggggcacgatggcctttaccagggtctcagtacagccaccaaggacacctacgacgcccttcacatgcaggccctgccccctcgcggctctggcgagggaaggggttccctgcttacttgcggcgacgtcgaagagaatcccggtccgatggccctcccagtaactgccctccttttgcccctcgcactccttcttcatgccgctcgccccaactgggtcaacgtgattagcgatttgaagaaaatcgaggaccttatacagtctatgcatattgacgctacactgtatactgagagtgatgtacacccgtcctgtaaggtaacggccatgaaatgctttcttctggagctccaggtcatcagcttggagtctggggacgcaagcatccacgatacggttgaaaacctcatcatccttgcgaacaactctctctcatctaatggaaacgttacagagagtgggtgtaaggagtgcgaagagttggaagaaaaaaacatcaaagaatttcttcaatccttcgttcacatagtgcaaatgttcattaacacgtccactaccacacccgccccgaggccacctacgccggcaccgactatcgccagtcaacccctctctctgcgccccgaggcttgccggcctgcggctggtggggcggtccacacccggggcctggattttgcgtgcgatatatacatctgggcacctcttgccggcacctgcggagtgctgcttctctcactcgttattacgctgtactgctaa

SEQ ID NO: 208 - DNA, 2169 bp, synthetic construct
  misc_feature 1..2169: note = NK77.75_CD70_DB04_D10 construct
  source 1..2169: mol_type = other DNA
atggccttaccagtgaccgccttgctcctgccgctggccttgctgctccacgccgccaggccggactacaaagacgatgacgataaaggcggtggtggctctggtggtggcggatcccaggtgcagctggtgcagtctggggctgaggtgaagaagcctggggcctcagtgaaggtttcctgcaaggcatctggatacaccttcaccggctactatatgcactgggtgcgacaggcccctggacaagggcttgagtggatgggaatgatcgatccaagcgacggtagcacaatttacgcacagaagttccagggcagagtcaccatgaccagggacacgtccacgagcacagtctacatggagctgagcagcctgagatctgaggacacggccgtgtattactgtgctagagagcggccactgtacgcttccgacctgtggggccaagggaccctggtcaccgtctcctcaggtggaggcggttcaggcggaggtggctctggcggtggcggatcggatatccagatgacccagtctccatcctccctgtctgcatctgtaggagacagagtcaccatcacttgccgggcaagtcaggacattggaaatgatttaggctggtatcagcagaaaccagggaaagcccctaagctcctgatctatgctgcatccagtttacaaagtggggtcccatcaaggttcagcggcagtggatctggcacagatttcactctcaccatcagcagcctgcagcctgaagattttgcaacttattactgtctacaagattacgactaccctctcactttcggccaggggaccaaggtggagatcaaaaccacgacgccagcgccgcggccaccaacaccggcgcccaccatcgcgtcgcagcccctgtccctgcgcccagaggcgtgccggccagcggcggggggcgcagtgcacacgagggggctggacttcgcctgtgatatctacatctgggcgcccttggccgggacttgtggggtccttctcctgtcactggttatcaccctttactgccggagggaccagaggctgccccccgatgcccacaagccccctgggggaggcagtttccggacccccatccaagaggagcaggccgacgcccactccaccctggccaagatcagagtgaagttcagcaggagcgcagacgcccccgcgtaccagcagggccagaaccagctctataacgagctcaatctaggacgaagagaggagtacgatgttttggacaagagacgtggccgggaccctgagatggggggaaagccgagaaggaagaaccctcaggaaggcctgtacaatgaactgcagaaagataagatggcggaggcctacagtgagattgggatgaaaggcgagcgccggaggggcaaggggcacgatggcctttaccagggtctcagtacagccaccaaggacacctacgacgcccttcacatgcaggccctgccccctcgcggctctggcgagggaaggggttccctgcttacttgcggcgacgtcgaagagaatcccggtccgatggccctcccagtaactgccctccttttgcccctcgcactccttcttcatgccgctcgccccaactgggtcaacgtgattagcgatttgaagaaaatcgaggaccttatacagtctatgcatattgacgctacactgtatactgagagtgatgtacacccgtcctgtaaggtaacggccatgaaatgctttcttctggagctccaggtcatcagcttggagtctggggacgcaagcatccacgatacggttgaaaacctcatcatccttgcgaacaactctctctcatctaatggaaacgttacagagagtgggtgtaaggagtgcgaagagttggaagaaaaaaacatcaaagaatttcttcaatccttcgttcacatagtgcaaatgttcattaacacgtccactaccacacccgccccgaggccacctacgccggcaccgactatcgccagtcaacccctctctctgcgccccgaggcttgccggcctgcggctggtggggcggtccacacccggggcctggattttgcgtgcgatatatacatctgggcacctcttgccggcacctgcggagtgctgcttctctcactcgttattacgctgtactgctaa

SEQ ID NO: 209 - DNA, 2172 bp, synthetic construct
  misc_feature 1..2172: note = NK77.85_CD70_DB03_B02 construct
  source 1..2172: mol_type = other DNA
atggccttaccagtgaccgccttgctcctgccgctggccttgctgctccacgccgccaggccggactacaaagacgatgacgataaaggcggtggtggctctggtggtggcggatcccaggtgcagctggtgcagtctggggctgaggtgaagaagcctgggtcttcagtgaaggtttcctgcaaggcatctggatacaccttcaccaactactatatgcactgggtgcgacaggcccctggacaagggcttgagtggatgggatggatgaaccccgatagtggtaatacagggtacgcacagaagttccagggcagagtcaccatcaccgctgacgaatccacgagcacagcctacatggagctgagcagcctgagatctgaggacacggccgtgtattactgtgctagaagtagcagctcctggcctgacttcgatctctggggccgtggcaccctggtcactgtctcctcaggtggaggcggttcaggcggaggtggctctggcggtggcggatcggacatccagatgacccagtctccatcctccctgtctgcatctgtaggagacagagtcaccatcacttgccgggcaagtcagagcattagcagctatttaaattggtatcagcagaaaccagggaaagcccctaagctcctgatctatgatgcatccaacttggagactggggtcccatcaaggttcagtggcagtggatctgggacagatttcactctcaccatcagcagtctgcaacctgaagattttgcaacttactactgtcaacagagttacaacaccccttacagttttggccaggggaccaaggtggagatcaaaaccacgacgccagcgccgcggccaccaacaccggcgcccaccatcgcgtcgcagcccctgtccctgcgcccagaggcgtgccggccagcggcggggggcgcagtgcacacgagggggctggacttcgcctgtgatatctacatctgggcgcccttggccgggacttgtggggtccttctcctgtcactggttatcaccctttactgccggagggaccagaggctgccccccgatgcccacaagccccctgggggaggcagtttccggacccccatccaagaggagcaggccgacgcccactccaccctggccaagatcagagtgaagttcagcaggagcgcagacgcccccgcgtaccagcagggccagaaccagctctataacgagctcaatctaggacgaagagaggagtacgatgttttggacaagagacgtggccgggaccctgagatggggggaaagccgagaaggaagaaccctcaggaaggcctgtacaatgaactgcagaaagataagatggcggaggcctacagtgagattgggatgaaaggcgagcgccggaggggcaaggggcacgatggcctttaccagggtctcagtacagccaccaaggacacctacgacgcccttcacatgcaggccctgccccctcgcggctctggcgagggaaggggttccctgcttacttgcggcgacgtcgaagagaatcccggtccgatggccctcccagtaactgccctccttttgcccctcgcactccttcttcatgccgctcgccccaactgggtcaacgtgattagcgatttgaagaaaatcgaggaccttatacagtctatgcatattgacgctacactgtatactgagagtgatgtacacccgtcctgtaaggtaacggccatgaaatgctttcttctggagctccaggtcatcagcttggagtctggggacgcaagcatccacgatacggttgaaaacctcatcatccttgcgaacaactctctctcatctaatggaaacgttacagagagtgggtgtaaggagtgcgaagagttggaagaaaaaaacatcaaagaatttcttcaatccttcgttcacatagtgcaaatgttcattaacacgtccactaccacacccgccccgaggccacctacgccggcaccgactatcgccagtcaacccctctctctgcgccccgaggcttgccggcctgcggctggtggggcggtccacacccggggcctggattttgcgtgcgatatatacatctgggcacctcttgccggcacctgcggagtgctgcttctctcactcgttattacgctgtactgctaa

SEQ ID NO: 210 - DNA, 2175 bp, synthetic construct
  misc_feature 1..2175: note = NK77.86_CD70_DB04_A06 construct
  source 1..2175: mol_type = other DNA
atggccttaccagtgaccgccttgctcctgccgctggccttgctgctccacgccgccaggccggactacaaagacgatgacgataaaggcggtggtggctctggtggtggcggatcccaggtccaactcgtacaatccggcgcagaagtcaaaaaacccggcgcaagcgtcaaggtatcatgtaaagctagcgggtatacatttacatcctattccatgcattgggtacgccaagctccaggccagggcctggaatgggtcggtatcattaatcccagttccggctctgccagttatgcgcaaaaatttcaaggaagggtgacaatgactcgagataccagtacctccactgtgtatatggaactgtcctcactaaggagcgaagatactgctgtatactactgcgcacgcgaacgtggggcctatagtagtaccttcgactattggggtcagggcacgttagtgacagtgtcttccggtggaggcggttcaggcggaggtggctctggcggtggcggatcggacatccagatgacccagtctccatcctccctgtctgcatctgtaggagacagagtcaccatcacttgccggacaagtcagagcattagcagctatttaaattggtatcagcagaaaccagggaaagcccctaagctcctgatctatgacgcatccaatttggaaaccggggtcccatcaaggttcagtggcagtggatctgggacagatttcactctcaccatcagcagtctgcaacctgaagattttgcaacttactactgtcttcaggactacagttaccctctcactttcggccaagggaccaaggtggagatcaaaaccacgacgccagcgccgcggccaccaacaccggcgcccaccatcgcgtcgcagcccctgtccctgcgcccagaggcgtgccggccagcggcggggggcgcagtgcacacgagggggctggacttcgcctgtgatatctacatctgggcgcccttggccgggacttgtggggtccttctcctgtcactggttatcaccctttactgccggagggaccagaggctgccccccgatgcccacaagccccctgggggaggcagtttccggacccccatccaagaggagcaggccgacgcccactccaccctggccaagatcagagtgaagttcagcaggagcgcagacgcccccgcgtaccagcagggccagaaccagctctataacgagctcaatctaggacgaagagaggagtacgatgttttggacaagagacgtggccgggaccctgagatggggggaaagccgagaaggaagaaccctcaggaaggcctgtacaatgaactgcagaaagataagatggcggaggcctacagtgagattgggatgaaaggcgagcgccggaggggcaaggggcacgatggcctttaccagggtctcagtacagccaccaaggacacctacgacgcccttcacatgcaggccctgccccctcgcggctctggcgagggaaggggttccctgcttacttgcggcgacgtcgaagagaatcccggtccgatggccctcccagtaactgccctccttttgcccctcgcactccttcttcatgccgctcgccccaactgggtcaacgtgattagcgatttgaagaaaatcgaggaccttatacagtctatgcatattgacgctacactgtatactgagagtgatgtacacccgtcctgtaaggtaacggccatgaaatgctttcttctggagctccaggtcatcagcttggagtctggggacgcaagcatccacgatacggttgaaaacctcatcatccttgcgaacaactctctctcatctaatggaaacgttacagagagtgggtgtaaggagtgcgaagagttggaagaaaaaaacatcaaagaatttcttcaatccttcgttcacatagtgcaaatgttcattaacacgtccactaccacacccgccccgaggccacctacgccggcaccgactatcgccagtcaacccctctctctgcgccccgaggcttgccggcctgcggctggtggggcggtccacacccggggcctggattttgcgtgcgatatatacatctgggcacctcttgccggcacctgcggagtgctgcttctctcactcgttattacgctgtactgctaa

SEQ ID NO: 211 - DNA, 2175 bp, synthetic construct
  misc_feature 1..2175: note = NK77.87_CD70_DB04_A09 construct
  source 1..2175: mol_type = other DNA
atggccttaccagtgaccgccttgctcctgccgctggccttgctgctccacgccgccaggccggactacaaagacgatgacgataaaggcggtggtggctctggtggtggcggatcccaggtgcagctggtgcagtctggggctgaggtgaagaagcctggggcctcagtgaaggtttcctgcaaggcatctggatacaccttcaccgactactatatgcactgggtgcgacaggcccctggacaagggcttgagtggatgggagtcatcaacccctctgatggtacagctcattacgcacagcggctgcagggcagagtcaccatgaccagggacacgtccacgagcacagtctacatggagctgagcagcctgagatctgaggacacggccgtgtattactgtgctagagacagcggatcttactacgctgactttgactactggggccaagggaccctggtcaccgtctcctcaggtggaggcggttcaggcggaggtggctctggcggtggcggatcggacatccagatgacccagtctccatcctccctgtctgcatctgtaggagacagagtcaccatcacttgccaggcaagtcaggacattagcaattatttaaattggtatcagcagaaaccagggaaagcccctaagctcctgatctatgatgcatccagtttgcaaagtggggtcccatcaaggttcagtggcagtggatctgggacagatttcactctcaccatcagcagtctgcaacctgaagattttgcaacttactactgtcaacagagttacagtacccctcccgccttcggccaagggaccaaggtggaaatcaaaaccacgacgccagcgccgcggccaccaacaccggcgcccaccatcgcgtcgcagcccctgtccctgcgcccagaggcgtgccggccagcggcggggggcgcagtgcacacgagggggctggacttcgcctgtgatatctacatctgggcgcccttggccgggacttgtggggtccttctcctgtcactggttatcaccctttactgccggagggaccagaggctgccccccgatgcccacaagccccctgggggaggcagtttccggacccccatccaagaggagcaggccgacgcccactccaccctggccaagatcagagtgaagttcagcaggagcgcagacgcccccgcgtaccagcagggccagaaccagctctataacgagctcaatctaggacgaagagaggagtacgatgttttggacaagagacgtggccgggaccctgagatggggggaaagccgagaaggaagaaccctcaggaaggcctgtacaatgaactgcagaaagataagatggcggaggcctacagtgagattgggatgaaaggcgagcgccggaggggcaaggggcacgatggcctttaccagggtctcagtacagccaccaaggacacctacgacgcccttcacatgcaggccctgccccctcgcggctctggcgagggaaggggttccctgcttacttgcggcgacgtcgaagagaatcccggtccgatggccctcccagtaactgccctccttttgcccctcgcactccttcttcatgccgctcgccccaactgggtcaacgtgattagcgatttgaagaaaatcgaggaccttatacagtctatgcatattgacgctacactgtatactgagagtgatgtacacccgtcctgtaaggtaacggccatgaaatgctttcttctggagctccaggtcatcagcttggagtctggggacgcaagcatccacgatacggttgaaaacctcatcatccttgcgaacaactctctctcatctaatggaaacgttacagagagtgggtgtaaggagtgcgaagagttggaagaaaaaaacatcaaagaatttcttcaatccttcgttcacatagtgcaaatgttcattaacacgtccactaccacacccgccccgaggccacctacgccggcaccgactatcgccagtcaacccctctctctgcgccccgaggcttgccggcctgcggctggtggggcggtccacacccggggcctggattttgcgtgcgatatatacatctgggcacctcttgccggcacctgcggagtgctgcttctctcactcgttattacgctgtactgctaa

SEQ ID NO: 212 - DNA, 2970 bp, synthetic construct
  misc_feature 1..2970: note = NK77.76_38-38 construct
  source 1..2970: mol_type = other DNA
atggccttaccagtgaccgccttgctcctgccgctggccttgctgctccacgccgccaggccggactacaaagacgatgacgataaaggcggtggtggctctggtggtggcggatcccaggtgcagctggtgcagtctggggctgaggtgaagaagcctggggcctcagtgaaggtttcctgcaaggcatctggatacagtttcaccagctactatatgcactgggtgcgacaggcccctggacaagggcttgagtggatgggaataatcaaccctagtggtgggactacaagctacgcacagaagttccagggcagagtcaccatgaccagggacacgtccacgagcacagtctacatggagctgagcagcctgagatctgaggacacggccgtgtattactgtgctagagacaattccccgtatagctcaagctggtgggactactttgactactggggccaagggaccctggtcaccgtctcctcaggtggaggcggttcaggcggaggtggctctggcggtggcggatcggacatccagatgacccagtctccatcctccctgtctgcatctgtaggagacagagtcaccatcacttgccgggcaagtcaggacattcggcattatttagcatggtatcagcagaaaccagggaaagcccctaagctcctgatctatgacgcatccagtttgcaaagtggggtcccatcaaggttcagtggcagtggatctgggacagatttcactctcaccatcagcagtctgcaacctgaagattttgcaacttactactgtcaacagacctacgacgcacctatcaccttcggccaagggacacgactggagattaaaggtggcggtggctcgggcggtggtgggtcgggtggcggcggatctcaggtgcagctggtgcagtctggggctgaggtgaagaagcctggggcctcagtgaaggtttcctgcaaggcatctggatacagtttcaccagctactatatgcactgggtgcgacaggcccctggacaagggcttgagtggatgggaataatcaaccctagtggtgggactacaagctacgcacagaagttccagggcagagtcaccatgaccagggacacgtccacgagcacagtctacatggagctgagcagcctgagatctgaggacacggccgtgtattactgtgctagagacaattccccgtatagctcaagctggtgggactactttgactactggggccaagggaccctggtcaccgtctcctcaggtggaggcggttcaggcggaggtggctctggcggtggcggatcggacatccagatgacccagtctccatcctccctgtctgcatctgtaggagacagagtcaccatcacttgccgggcaagtcaggacattcggcattatttagcatggtatcagcagaaaccagggaaagcccctaagctcctgatctatgacgcatccagtttgcaaagtggggtcccatcaaggttcagtggcagtggatctgggacagatttcactctcaccatcagcagtctgcaacctgaagattttgcaacttactactgtcaacagacctacgacgcacctatcaccttcggccaagggacacgactggagattaaaaccacgacgccagcgccgcggccaccaacaccggcgcccaccatcgcgtcgcagcccctgtccctgcgcccagaggcgtgccggccagcggcggggggcgcagtgcacacgagggggctggacttcgcctgtgatatctacatctgggcgcccttggccgggacttgtggggtccttctcctgtcactggttatcaccctttactgccggagggaccagaggctgccccccgatgcccacaagccccctgggggaggcagtttccggacccccatccaagaggagcaggccgacgcccactccaccctggccaagatcagagtgaagttcagcaggagcgcagacgcccccgcgtaccagcagggccagaaccagctctataacgagctcaatctaggacgaagagaggagtacgatgttttggacaagagacgtggccgggaccctgagatggggggaaagccgagaaggaagaaccctcaggaaggcctgtacaatgaactgcagaaagataagatggcggaggcctacagtgagattgggatgaaaggcgagcgccggaggggcaaggggcacgatggcctttaccagggtctcagtacagccaccaaggacacctacgacgcccttcacatgcaggccctgccccctcgcggctctggcgagggaaggggttccctgcttacttgcggcgacgtcgaagagaatcccggtccgatggccctcccagtaactgccctccttttgcccctcgcactccttcttcatgccgctcgccccaactgggtcaacgtgattagcgatttgaagaaaatcgaggaccttatacagtctatgcatattgacgctacactgtatactgagagtgatgtacacccgtcctgtaaggtaacggccatgaaatgctttcttctggagctccaggtcatcagcttggagtctggggacgcaagcatccacgatacggttgaaaacctcatcatccttgcgaacaactctctctcatctaatggaaacgttacagagagtgggtgtaaggagtgcgaagagttggaagaaaaaaacatcaaagaatttcttcaatccttcgttcacatagtgcaaatgttcattaacacgtccactaccacacccgccccgaggccacctacgccggcaccgactatcgccagtcaacccctctctctgcgccccgaggcttgccggcctgcggctggtggggcggtccacacccggggcctggattttgcgtgcgatatatacatctgggcacctcttgccggcacctgcggagtgctgcttctctcactcgttattacgctgtactgctaa

SEQ ID NO: 213 - DNA, 2970 bp, synthetic construct
  misc_feature 1..2970: note = NK77.77_64-64 construct
  source 1..2970: mol_type = other DNA
atggccttaccagtgaccgccttgctcctgccgctggccttgctgctccacgccgccaggccggactacaaagacgatgacgataaaggcggtggtggctctggtggtggcggatcccaggtgcagctggtgcagtctggggctgaggtgaagaagcctgggtcctcggtgaaggtctcctgcaaggcttctggatacaccttcaccagctatggaatcagctgggtgcgacaggcccctggacaagggcttgagtggatgggaggtatcatccctatctttggtacaacgaactacgcacagaagttccagggcagagtcacgattaccgcggacgaatccacgagcacagcctacatggagctgagcagcctgagatctgaggacacggccgtgtattactgtgcgagagatcatagcggcgatgggtacttcgatctctggggccgtggcaccctggtcactgtctcctcaggtggaggcggttcaggcggaggtggctctggcggtggcggatcggatattgtgatgactcagtctccactctccctgcccgtcacccctggagagccggcctccatctcctgcaggtctagtcagagcctcctgcactccaacggatacaactatttggattggtacctgcagaagccagggcagtctccacagctcctgatctatgatgcctcttcacttcagtccggggtccctgacaggttcagtggcagtggatcaggcacagattttacactgaaaatcagcagagtggaggctgaggatgttggggtttattactgcatgcaaggaacacactggcctcccacgttcggccaagggaccaaggtggaaatcaaaggtggcggtggctcgggcggtggtgggtcgggtggcggcggatctcaggtgcagctggtgcagtctggggctgaggtgaagaagcctgggtcctcggtgaaggtctcctgcaaggcttctggatacaccttcaccagctatggaatcagctgggtgcgacaggcccctggacaagggcttgagtggatgggaggtatcatccctatctttggtacaacgaactacgcacagaagttccagggcagagtcacgattaccgcggacgaatccacgagcacagcctacatggagctgagcagcctgagatctgaggacacggccgtgtattactgtgcgagagatcatagcggcgatgggtacttcgatctctggggccgtggcaccctggtcactgtctcctcaggtggaggcggttcaggcggaggtggctctggcggtggcggatcggatattgtgatgactcagtctccactctccctgcccgtcacccctggagagccggcctccatctcctgcaggtctagtcagagcctcctgcactccaacggatacaactatttggattggtacctgcagaagccagggcagtctccacagctcctgatctatgatgcctcttcacttcagtccggggtccctgacaggttcagtggcagtggatcaggcacagattttacactgaaaatcagcagagtggaggctgaggatgttggggtttattactgcatgcaaggaacacactggcctcccacgttcggccaagggaccaaggtggaaatcaaaaccacgacgccagcgccgcggccaccaacaccggcgcccaccatcgcgtcgcagcccctgtccctgcgcccagaggcgtgccggccagcggcggggggcgcagtgcacacgagggggctggacttcgcctgtgatatctacatctgggcgcccttggccgggacttgtggggtccttctcctgtcactggttatcaccctttactgccggagggaccagaggctgccccccgatgcccacaagccccctgggggaggcagtttccggacccccatccaagaggagcaggccgacgcccactccaccctggccaagatcagagtgaagttcagcaggagcgcagacgcccccgcgtaccagcagggccagaaccagctctataacgagctcaatctaggacgaagagaggagtacgatgttttggacaagagacgtggccgggaccctgagatggggggaaagccgagaaggaagaaccctcaggaaggcctgtacaatgaactgcagaaagataagatggcggaggcctacagtgagattgggatgaaaggcgagcgccggaggggcaaggggcacgatggcctttaccagggtctcagtacagccaccaaggacacctacgacgcccttcacatgcaggccctgccccctcgcggctctggcgagggaaggggttccctgcttacttgcggcgacgtcgaagagaatcccggtccgatggccctcccagtaactgccctccttttgcccctcgcactccttcttcatgccgctcgccccaactgggtcaacgtgattagcgatttgaagaaaatcgaggaccttatacagtctatgcatattgacgctacactgtatactgagagtgatgtacacccgtcctgtaaggtaacggccatgaaatgctttcttctggagctccaggtcatcagcttggagtctggggacgcaagcatccacgatacggttgaaaacctcatcatccttgcgaacaactctctctcatctaatggaaacgttacagagagtgggtgtaaggagtgcgaagagttggaagaaaaaaacatcaaagaatttcttcaatccttcgttcacatagtgcaaatgttcattaacacgtccactaccacacccgccccgaggccacctacgccggcaccgactatcgccagtcaacccctctctctgcgccccgaggcttgccggcctgcggctggtggggcggtccacacccggggcctggattttgcgtgcgatatatacatctgggcacctcttgccggcacctgcggagtgctgcttctctcactcgttattacgctgtactgctaa

SEQ ID NO: 214 - DNA, 2934 bp, synthetic construct
  misc_feature 1..2934: note = NK77.78_65-65 construct
  source 1..2934: mol_type = other DNA
atggccttaccagtgaccgccttgctcctgccgctggccttgctgctccacgccgccaggccggactacaaagacgatgacgataaaggcggtggtggctctggtggtggcggatcccaggtgcagctggtgcagtctggggctgaggtgaagaagcctggggcctcagtgaaggtctcctgcaaggcttctggatacaccttcaccgagaatgagatgcactgggtgcgacaggcccctggacaagggcttgagtggatgggatggatcaacccgaacagtggtggcacaaactatgcacagaagtttcagggcagggtcaccatgaccagggacacgtccactagcacagtgtacatggagctgagctctctgagatctgaagacacggccgtgtattactgtgcggggagctggggtggttactactttgactactggggccaagggaccctggtcaccgtctcctcaggtggaggcggttcaggcggaggtggctctggcggtggcggatcggacatccagatgacccagtctccatcctccctgtctgcatctgtaggagacagagtcaccatcacttgccgggcaagtcagagcgttagcagatatttaaattggtatcagcagaaaccagggaaagcccctaagctcctgatctatgatgcatccaatttggaaaccggggtcccatcaaggttcagtggcagtggatctgggacagatttcactctcaccatcagcagtctgcaacctgaagattttgcaacttactactgtcaacaggccgacagtttccctgtgacttttggccaggggaccaagctggagatcaaaggtggcggtggctcgggcggtggtgggtcgggtggcggcggatctcaggtgcagctggtgcagtctggggctgaggtgaagaagcctggggcctcagtgaaggtctcctgcaaggcttctggatacaccttcaccgagaatgagatgcactgggtgcgacaggcccctggacaagggcttgagtggatgggatggatcaacccgaacagtggtggcacaaactatgcacagaagtttcagggcagggtcaccatgaccagggacacgtccactagcacagtgtacatggagctgagctctctgagatctgaagacacggccgtgtattactgtgcggggagctggggtggttactactttgactactggggccaagggaccctggtcaccgtctcctcaggtggaggcggttcaggcggaggtggctctggcggtggcggatcggacatccagatgacccagtctccatcctccctgtctgcatctgtaggagacagagtcaccatcacttgccgggcaagtcagagcgttagcagatatttaaattggtatcagcagaaaccagggaaagcccctaagctcctgatctatgatgcatccaatttggaaaccggggtcccatcaaggttcagtggcagtggatctgggacagatttcactctcaccatcagcagtctgcaacctgaagattttgcaacttactactgtcaacaggccgacagtttccctgtgacttttggccaggggaccaagctggagatcaaaaccacgacgccagcgccgcggccaccaacaccggcgcccaccatcgcgtcgcagcccctgtccctgcgcccagaggcgtgccggccagcggcggggggcgcagtgcacacgagggggctggacttcgcctgtgatatctacatctgggcgcccttggccgggacttgtggggtccttctcctgtcactggttatcaccctttactgccggagggaccagaggctgccccccgatgcccacaagccccctgggggaggcagtttccggacccccatccaagaggagcaggccgacgcccactccaccctggccaagatcagagtgaagttcagcaggagcgcagacgcccccgcgtaccagcagggccagaaccagctctataacgagctcaatctaggacgaagagaggagtacgatgttttggacaagagacgtggccgggaccctgagatggggggaaagccgagaaggaagaaccctcaggaaggcctgtacaatgaactgcagaaagataagatggcggaggcctacagtgagattgggatgaaaggcgagcgccggaggggcaaggggcacgatggcctttaccagggtctcagtacagccaccaaggacacctacgacgcccttcacatgcaggccctgccccctcgcggctctggcgagggaaggggttccctgcttacttgcggcgacgtcgaagagaatcccggtccgatggccctcccagtaactgccctccttttgcccctcgcactccttcttcatgccgctcgccccaactgggtcaacgtgattagcgatttgaagaaaatcgaggaccttatacagtctatgcatattgacgctacactgtatactgagagtgatgtacacccgtcctgtaaggtaacggccatgaaatgctttcttctggagctccaggtcatcagcttggagtctggggacgcaagcatccacgatacggttgaaaacctcatcatccttgcgaacaactctctctcatctaatggaaacgttacagagagtgggtgtaaggagtgcgaagagttggaagaaaaaaacatcaaagaatttcttcaatccttcgttcacatagtgcaaatgttcattaacacgtccactaccacacccgccccgaggccacctacgccggcaccgactatcgccagtcaacccctctctctgcgccccgaggcttgccggcctgcggctggtggggcggtccacacccggggcctggattttgcgtgcgatatatacatctgggcacctcttgccggcacctgcggagtgctgcttctctcactcgttattacgctgtactgctaa

SEQ ID NO: 215 - DNA, 2979 bp, synthetic construct
  misc_feature 1..2979: note = NK77.79_38-67 construct
  source 1..2979: mol_type = other DNA
atggccttaccagtgaccgccttgctcctgccgctggccttgctgctccacgccgccaggccggactacaaagacgatgacgataaaggcggtggtggctctggtggtggcggatcccaggtgcagctggtgcagtctggggctgaggtgaagaagcctggggcctcagtgaaggtttcctgcaaggcatctggatacagtttcaccagctactatatgcactgggtgcgacaggcccctggacaagggcttgagtggatgggaataatcaaccctagtggtgggactacaagctacgcacagaagttccagggcagagtcaccatgaccagggacacgtccacgagcacagtctacatggagctgagcagcctgagatctgaggacacggccgtgtattactgtgctagagacaattccccgtatagctcaagctggtgggactactttgactactggggccaagggaccctggtcaccgtctcctcaggtggaggcggttcaggcggaggtggctctggcggtggcggatcggacatccagatgacccagtctccatcctccctgtctgcatctgtaggagacagagtcaccatcacttgccgggcaagtcaggacattcggcattatttagcatggtatcagcagaaaccagggaaagcccctaagctcctgatctatgacgcatccagtttgcaaagtggggtcccatcaaggttcagtggcagtggatctgggacagatttcactctcaccatcagcagtctgcaacctgaagattttgcaacttactactgtcaacagacctacgacgcacctatcaccttcggccaagggacacgactggagattaaaggtggcggtggctcgggcggtggtgggtcgggtggcggcggatctcaggtgcagctggtgcagtctggggctgaggtgaagaagcctgggtcctcggtgaaggtctcctgcaaggcttctggaggcaccttcagcagctatgctatcagctgggtgcgacaggcccctggacaagggcttgagtggatgggaggaatcacaccaatgtttggtacaacggactacgcacagaagttccagggcagagtcacgattaccgcggacgaatccacgagcacagcctacatggagctgagcagcctgagatctgaggacacggccgtgtattactgtgcgagagatgagcgggacggatacgccacagtggcttttgatatctggggccaagggacaatggtcaccgtctcttcaggtggaggcggttcaggcggaggtggctctggcggtggcggatcggatattgtgatgactcagtctccactctccctgcccgtcacccctggagagccggcctccatctcctgcaggtctagtcagagcctcctgcatagcaatggatacaactatttggattggtacctgcagaagccagggcagtctccacagctcctgatctatgatgcttctaatcttgagacaggggtccctgacaggttcagtggcagtggatcaggcacagattttacactgaaaatcagcagagtggaggctgaggatgttggggtttattactgcatgcaagggacgcattggcctcccacgttcggccaagggaccaaggtggaaatcaaaaccacgacgccagcgccgcggccaccaacaccggcgcccaccatcgcgtcgcagcccctgtccctgcgcccagaggcgtgccggccagcggcggggggcgcagtgcacacgagggggctggacttcgcctgtgatatctacatctgggcgcccttggccgggacttgtggggtccttctcctgtcactggttatcaccctttactgccggagggaccagaggctgccccccgatgcccacaagccccctgggggaggcagtttccggacccccatccaagaggagcaggccgacgcccactccaccctggccaagatcagagtgaagttcagcaggagcgcagacgcccccgcgtaccagcagggccagaaccagctctataacgagctcaatctaggacgaagagaggagtacgatgttttggacaagagacgtggccgggaccctgagatggggggaaagccgagaaggaagaaccctcaggaaggcctgtacaatgaactgcagaaagataagatggcggaggcctacagtgagattgggatgaaaggcgagcgccggaggggcaaggggcacgatggcctttaccagggtctcagtacagccaccaaggacacctacgacgcccttcacatgcaggccctgccccctcgcggctctggcgagggaaggggttccctgcttacttgcggcgacgtcgaagagaatcccggtccgatggccctcccagtaactgccctccttttgcccctcgcactccttcttcatgccgctcgccccaactgggtcaacgtgattagcgatttgaagaaaatcgaggaccttatacagtctatgcatattgacgctacactgtatactgagagtgatgtacacccgtcctgtaaggtaacggccatgaaatgctttcttctggagctccaggtcatcagcttggagtctggggacgcaagcatccacgatacggttgaaaacctcatcatccttgcgaacaactctctctcatctaatggaaacgttacagagagtgggtgtaaggagtgcgaagagttggaagaaaaaaacatcaaagaatttcttcaatccttcgttcacatagtgcaaatgttcattaacacgtccactaccacacccgccccgaggccacctacgccggcaccgactatcgccagtcaacccctctctctgcgccccgaggcttgccggcctgcggctggtggggcggtccacacccggggcctggattttgcgtgcgatatatacatctgggcacctcttgccggcacctgcggagtgctgcttctctcactcgttattacgctgtactgctaa

SEQ ID NO: 216 - DNA, 2964 bp, synthetic construct
  misc_feature 1..2964: note = NK77.80_38-68 construct
  source 1..2964: mol_type = other DNA
atggccttaccagtgaccgccttgctcctgccgctggccttgctgctccacgccgccaggccggactacaaagacgatgacgataaaggcggtggtggctctggtggtggcggatcccaggtgcagctggtgcagtctggggctgaggtgaagaagcctggggcctcagtgaaggtttcctgcaaggcatctggatacagtttcaccagctactatatgcactgggtgcgacaggcccctggacaagggcttgagtggatgggaataatcaaccctagtggtgggactacaagctacgcacagaagttccagggcagagtcaccatgaccagggacacgtccacgagcacagtctacatggagctgagcagcctgagatctgaggacacggccgtgtattactgtgctagagacaattccccgtatagctcaagctggtgggactactttgactactggggccaagggaccctggtcaccgtctcctcaggtggaggcggttcaggcggaggtggctctggcggtggcggatcggacatccagatgacccagtctccatcctccctgtctgcatctgtaggagacagagtcaccatcacttgccgggcaagtcaggacattcggcattatttagcatggtatcagcagaaaccagggaaagcccctaagctcctgatctatgacgcatccagtttgcaaagtggggtcccatcaaggttcagtggcagtggatctgggacagatttcactctcaccatcagcagtctgcaacctgaagattttgcaacttactactgtcaacagacctacgacgcacctatcaccttcggccaagggacacgactggagattaaaggtggcggtggctcgggcggtggtgggtcgggtggcggcggatctcaggtgcagctggtgcagtctggggctgaggtgaagaagcctggggcctcagtgaaggtttcctgcaaggcatctggatacaccttcaccagctactatatgcactgggtgcgacaggcccctggacaagggcttgagtggatgggaataatcaaccctagtgacggaggaacaagctacgcagacaagttccagggcagagtcaccatgaccagggacacgtccacgagcacagtctacatggagctgagcagcctgagatctgaggacacggccgtgtattactgtgctagagcgcttgcccccctgggatggggtgacggcatggatgtctggggccaagggacaacagtcaccgtctcttcaggtggaggcggttcaggcggaggtggctctggcggtggcggatcggacatccagatgacccagtctccatcctccctgtctgcatctgtaggagacagagtcaccatcacttgccaggcgagtcaggacattagcaactatttaaattggtatcagcagaaaccagggaaagcccctaagctcctgatctacgatgcatccaatttggaaacaggggtcccatcaaggttcagtggaagtggatctgggacagattttactctcaccatcagcagcctgcagcctgaagatttcgcaacatattactgtcaacagtcatatgatggacctatcaccttcggccaagggacacgactggagattaaaaccacgacgccagcgccgcggccaccaacaccggcgcccaccatcgcgtcgcagcccctgtccctgcgcccagaggcgtgccggccagcggcggggggcgcagtgcacacgagggggctggacttcgcctgtgatatctacatctgggcgcccttggccgggacttgtggggtccttctcctgtcactggttatcaccctttactgccggagggaccagaggctgccccccgatgcccacaagccccctgggggaggcagtttccggacccccatccaagaggagcaggccgacgcccactccaccctggccaagatcagagtgaagttcagcaggagcgcagacgcccccgcgtaccagcagggccagaaccagctctataacgagctcaatctaggacgaagagaggagtacgatgttttggacaagagacgtggccgggaccctgagatggggggaaagccgagaaggaagaaccctcaggaaggcctgtacaatgaactgcagaaagataagatggcggaggcctacagtgagattgggatgaaaggcgagcgccggaggggcaaggggcacgatggcctttaccagggtctcagtacagccaccaaggacacctacgacgcccttcacatgcaggccctgccccctcgcggctctggcgagggaaggggttccctgcttacttgcggcgacgtcgaagagaatcccggtccgatggccctcccagtaactgccctccttttgcccctcgcactccttcttcatgccgctcgccccaactgggtcaacgtgattagcgatttgaagaaaatcgaggaccttatacagtctatgcatattgacgctacactgtatactgagagtgatgtacacccgtcctgtaaggtaacggccatgaaatgctttcttctggagctccaggtcatcagcttggagtctggggacgcaagcatccacgatacggttgaaaacctcatcatccttgcgaacaactctctctcatctaatggaaacgttacagagagtgggtgtaaggagtgcgaagagttggaagaaaaaaacatcaaagaatttcttcaatccttcgttcacatagtgcaaatgttcattaacacgtccactaccacacccgccccgaggccacctacgccggcaccgactatcgccagtcaacccctctctctgcgccccgaggcttgccggcctgcggctggtggggcggtccacacccggggcctggattttgcgtgcgatatatacatctgggcacctcttgccggcacctgcggagtgctgcttctctcactcgttattacgctgtactgctaa

SEQ ID NO: 217 - DNA, 2979 bp, synthetic construct
  misc_feature 1..2979: note = NK77.81_64-67 construct
  source 1..2979: mol_type = other DNA
atggccttaccagtgaccgccttgctcctgccgctggccttgctgctccacgccgccaggccggactacaaagacgatgacgataaaggcggtggtggctctggtggtggcggatcccaggtgcagctggtgcagtctggggctgaggtgaagaagcctgggtcctcggtgaaggtctcctgcaaggcttctggatacaccttcaccagctatggaatcagctgggtgcgacaggcccctggacaagggcttgagtggatgggaggtatcatccctatctttggtacaacgaactacgcacagaagttccagggcagagtcacgattaccgcggacgaatccacgagcacagcctacatggagctgagcagcctgagatctgaggacacggccgtgtattactgtgcgagagatcatagcggcgatgggtacttcgatctctggggccgtggcaccctggtcactgtctcctcaggtggaggcggttcaggcggaggtggctctggcggtggcggatcggatattgtgatgactcagtctccactctccctgcccgtcacccctggagagccggcctccatctcctgcaggtctagtcagagcctcctgcactccaacggatacaactatttggattggtacctgcagaagccagggcagtctccacagctcctgatctatgatgcctcttcacttcagtccggggtccctgacaggttcagtggcagtggatcaggcacagattttacactgaaaatcagcagagtggaggctgaggatgttggggtttattactgcatgcaaggaacacactggcctcccacgttcggccaagggaccaaggtggaaatcaaaggtggcggtggctcgggcggtggtgggtcgggtggcggcggatctcaggtgcagctggtgcagtctggggctgaggtgaagaagcctgggtcctcggtgaaggtctcctgcaaggcttctggaggcaccttcagcagctatgctatcagctgggtgcgacaggcccctggacaagggcttgagtggatgggaggaatcacaccaatgtttggtacaacggactacgcacagaagttccagggcagagtcacgattaccgcggacgaatccacgagcacagcctacatggagctgagcagcctgagatctgaggacacggccgtgtattactgtgcgagagatgagcgggacggatacgccacagtggcttttgatatctggggccaagggacaatggtcaccgtctcttcaggtggaggcggttcaggcggaggtggctctggcggtggcggatcggatattgtgatgactcagtctccactctccctgcccgtcacccctggagagccggcctccatctcctgcaggtctagtcagagcctcctgcatagcaatggatacaactatttggattggtacctgcagaagccagggcagtctccacagctcctgatctatgatgcttctaatcttgagacaggggtccctgacaggttcagtggcagtggatcaggcacagattttacactgaaaatcagcagagtggaggctgaggatgttggggtttattactgcatgcaagggacgcattggcctcccacgttcggccaagggaccaaggtggaaatcaaaaccacgacgccagcgccgcggccaccaacaccggcgcccaccatcgcgtcgcagcccctgtccctgcgcccagaggcgtgccggccagcggcggggggcgcagtgcacacgagggggctggacttcgcctgtgatatctacatctgggcgcccttggccgggacttgtggggtccttctcctgtcactggttatcaccctttactgccggagggaccagaggctgccccccgatgcccacaagccccctgggggaggcagtttccggacccccatccaagaggagcaggccgacgcccactccaccctggccaagatcagagtgaagttcagcaggagcgcagacgcccccgcgtaccagcagggccagaaccagctctataacgagctcaatctaggacgaagagaggagtacgatgttttggacaagagacgtggccgggaccctgagatggggggaaagccgagaaggaagaaccctcaggaaggcctgtacaatgaactgcagaaagataagatggcggaggcctacagtgagattgggatgaaaggcgagcgccggaggggcaaggggcacgatggcctttaccagggtctcagtacagccaccaaggacacctacgacgcccttcacatgcaggccctgccccctcgcggctctggcgagggaaggggttccctgcttacttgcggcgacgtcgaagagaatcccggtccgatggccctcccagtaactgccctccttttgcccctcgcactccttcttcatgccgctcgccccaactgggtcaacgtgattagcgatttgaagaaaatcgaggaccttatacagtctatgcatattgacgctacactgtatactgagagtgatgtacacccgtcctgtaaggtaacggccatgaaatgctttcttctggagctccaggtcatcagcttggagtctggggacgcaagcatccacgatacggttgaaaacctcatcatccttgcgaacaactctctctcatctaatggaaacgttacagagagtgggtgtaaggagtgcgaagagttggaagaaaaaaacatcaaagaatttcttcaatccttcgttcacatagtgcaaatgttcattaacacgtccactaccacacccgccccgaggccacctacgccggcaccgactatcgccagtcaacccctctctctgcgccccgaggcttgccggcctgcggctggtggggcggtccacacccggggcctggattttgcgtgcgatatatacatctgggcacctcttgccggcacctgcggagtgctgcttctctcactcgttattacgctgtactgctaa

SEQ ID NO: 218 - DNA, 2964 bp, synthetic construct
  misc_feature 1..2964: note = NK77.82_64-68 construct
  source 1..2964: mol_type = other DNA
atggccttaccagtgaccgccttgctcctgccgctggccttgctgctccacgccgccaggccggactacaaagacgatgacgataaaggcggtggtggctctggtggtggcggatcccaggtgcagctggtgcagtctggggctgaggtgaagaagcctgggtcctcggtgaaggtctcctgcaaggcttctggatacaccttcaccagctatggaatcagctgggtgcgacaggcccctggacaagggcttgagtggatgggaggtatcatccctatctttggtacaacgaactacgcacagaagttccagggcagagtcacgattaccgcggacgaatccacgagcacagcctacatggagctgagcagcctgagatctgaggacacggccgtgtattactgtgcgagagatcatagcggcgatgggtacttcgatctctggggccgtggcaccctggtcactgtctcctcaggtggaggcggttcaggcggaggtggctctggcggtggcggatcggatattgtgatgactcagtctccactctccctgcccgtcacccctggagagccggcctccatctcctgcaggtctagtcagagcctcctgcactccaacggatacaactatttggattggtacctgcagaagccagggcagtctccacagctcctgatctatgatgcctcttcacttcagtccggggtccctgacaggttcagtggcagtggatcaggcacagattttacactgaaaatcagcagagtggaggctgaggatgttggggtttattactgcatgcaaggaacacactggcctcccacgttcggccaagggaccaaggtggaaatcaaaggtggcggtggctcgggcggtggtgggtcgggtggcggcggatctcaggtgcagctggtgcagtctggggctgaggtgaagaagcctggggcctcagtgaaggtttcctgcaaggcatctggatacaccttcaccagctactatatgcactgggtgcgacaggcccctggacaagggcttgagtggatgggaataatcaaccctagtgacggaggaacaagctacgcagacaagttccagggcagagtcaccatgaccagggacacgtccacgagcacagtctacatggagctgagcagcctgagatctgaggacacggccgtgtattactgtgctagagcgcttgcccccctgggatggggtgacggcatggatgtctggggccaagggacaacagtcaccgtctcttcaggtggaggcggttcaggcggaggtggctctggcggtggcggatcggacatccagatgacccagtctccatcctccctgtctgcatctgtaggagacagagtcaccatcacttgccaggcgagtcaggacattagcaactatttaaattggtatcagcagaaaccagggaaagcccctaagctcctgatctacgatgcatccaatttggaaacaggggtcccatcaaggttcagtggaagtggatctgggacagattttactctcaccatcagcagcctgcagcctgaagatttcgcaacatattactgtcaacagtcatatgatggacctatcaccttcggccaagggacacgactggagattaaaaccacgacgccagcgccgcggccaccaacaccggcgcccaccatcgcgtcgcagcccctgtccctgcgcccagaggcgtgccggccagcggcggggggcgcagtgcacacgagggggctggacttcgcctgtgatatctacatctgggcgcccttggccgggacttgtggggtccttctcctgtcactggttatcaccctttactgccggagggaccagaggctgccccccgatgcccacaagccccctgggggaggcagtttccggacccccatccaagaggagcaggccgacgcccactccaccctggccaagatcagagtgaagttcagcaggagcgcagacgcccccgcgtaccagcagggccagaaccagctctataacgagctcaatctaggacgaagagaggagtacgatgttttggacaagagacgtggccgggaccctgagatggggggaaagccgagaaggaagaaccctcaggaaggcctgtacaatgaactgcagaaagataagatggcggaggcctacagtgagattgggatgaaaggcgagcgccggaggggcaaggggcacgatggcctttaccagggtctcagtacagccaccaaggacacctacgacgcccttcacatgcaggccctgccccctcgcggctctggcgagggaaggggttccctgcttacttgcggcgacgtcgaagagaatcccggtccgatggccctcccagtaactgccctccttttgcccctcgcactccttcttcatgccgctcgccccaactgggtcaacgtgattagcgatttgaagaaaatcgaggaccttatacagtctatgcatattgacgctacactgtatactgagagtgatgtacacccgtcctgtaaggtaacggccatgaaatgctttcttctggagctccaggtcatcagcttggagtctggggacgcaagcatccacgatacggttgaaaacctcatcatccttgcgaacaactctctctcatctaatggaaacgttacagagagtgggtgtaaggagtgcgaagagttggaagaaaaaaacatcaaagaatttcttcaatccttcgttcacatagtgcaaatgttcattaacacgtccactaccacacccgccccgaggccacctacgccggcaccgactatcgccagtcaacccctctctctgcgccccgaggcttgccggcctgcggctggtggggcggtccacacccggggcctggattttgcgtgcgatatatacatctgggcacctcttgccggcacctgcggagtgctgcttctctcactcgttattacgctgtactgctaa

SEQ ID NO: 219 - DNA, 2961 bp, synthetic construct
  misc_feature 1..2961: note = NK77.83_65-67 construct
  source 1..2961: mol_type = other DNA
atggccttaccagtgaccgccttgctcctgccgctggccttgctgctccacgccgccaggccggactacaaagacgatgacgataaaggcggtggtggctctggtggtggcggatcccaggtgcagctggtgcagtctggggctgaggtgaagaagcctggggcctcagtgaaggtctcctgcaaggcttctggatacaccttcaccgagaatgagatgcactgggtgcgacaggcccctggacaagggcttgagtggatgggatggatcaacccgaacagtggtggcacaaactatgcacagaagtttcagggcagggtcaccatgaccagggacacgtccactagcacagtgtacatggagctgagctctctgagatctgaagacacggccgtgtattactgtgcggggagctggggtggttactactttgactactggggccaagggaccctggtcaccgtctcctcaggtggaggcggttcaggcggaggtggctctggcggtggcggatcggacatccagatgacccagtctccatcctccctgtctgcatctgtaggagacagagtcaccatcacttgccgggcaagtcagagcgttagcagatatttaaattggtatcagcagaaaccagggaaagcccctaagctcctgatctatgatgcatccaatttggaaaccggggtcccatcaaggttcagtggcagtggatctgggacagatttcactctcaccatcagcagtctgcaacctgaagattttgcaacttactactgtcaacaggccgacagtttccctgtgacttttggccaggggaccaagctggagatcaaaggtggcggtggctcgggcggtggtgggtcgggtggcggcggatctcaggtgcagctggtgcagtctggggctgaggtgaagaagcctgggtcctcggtgaaggtctcctgcaaggcttctggaggcaccttcagcagctatgctatcagctgggtgcgacaggcccctggacaagggcttgagtggatgggaggaatcacaccaatgtttggtacaacggactacgcacagaagttccagggcagagtcacgattaccgcggacgaatccacgagcacagcctacatggagctgagcagcctgagatctgaggacacggccgtgtattactgtgcgagagatgagcgggacggatacgccacagtggcttttgatatctggggccaagggacaatggtcaccgtctcttcaggtggaggcggttcaggcggaggtggctctggcggtggcggatcggatattgtgatgactcagtctccactctccctgcccgtcacccctggagagccggcctccatctcctgcaggtctagtcagagcctcctgcatagcaatggatacaactatttggattggtacctgcagaagccagggcagtctccacagctcctgatctatgatgcttctaatcttgagacaggggtccctgacaggttcagtggcagtggatcaggcacagattttacactgaaaatcagcagagtggaggctgaggatgttggggtttattactgcatgcaagggacgcattggcctcccacgttcggccaagggaccaaggtggaaatcaaaaccacgacgccagcgccgcggccaccaacaccggcgcccaccatcgcgtcgcagcccctgtccctgcgcccagaggcgtgccggccagcggcggggggcgcagtgcacacgagggggctggacttcgcctgtgatatctacatctgggcgcccttggccgggacttgtggggtccttctcctgtcactggttatcaccctttactgccggagggaccagaggctgccccccgatgcccacaagccccctgggggaggcagtttccggacccccatccaagaggagcaggccgacgcccactccaccctggccaagatcagagtgaagttcagcaggagcgcagacgcccccgcgtaccagcagggccagaaccagctctataacgagctcaatctaggacgaagagaggagtacgatgttttggacaagagacgtggccgggaccctgagatggggggaaagccgagaaggaagaaccctcaggaaggcctgtacaatgaactgcagaaagataagatggcggaggcctacagtgagattgggatgaaaggcgagcgccggaggggcaaggggcacgatggcctttaccagggtctcagtacagccaccaaggacacctacgacgcccttcacatgcaggccctgccccctcgcggctctggcgagggaaggggttccctgcttacttgcggcgacgtcgaagagaatcccggtccgatggccctcccagtaactgccctccttttgcccctcgcactccttcttcatgccgctcgccccaactgggtcaacgtgattagcgatttgaagaaaatcgaggaccttatacagtctatgcatattgacgctacactgtatactgagagtgatgtacacccgtcctgtaaggtaacggccatgaaatgctttcttctggagctccaggtcatcagcttggagtctggggacgcaagcatccacgatacggttgaaaacctcatcatccttgcgaacaactctctctcatctaatggaaacgttacagagagtgggtgtaaggagtgcgaagagttggaagaaaaaaacatcaaagaatttcttcaatccttcgttcacatagtgcaaatgttcattaacacgtccactaccacacccgccccgaggccacctacgccggcaccgactatcgccagtcaacccctctctctgcgccccgaggcttgccggcctgcggctggtggggcggtccacacccggggcctggattttgcgtgcgatatatacatctgggcacctcttgccggcacctgcggagtgctgcttctctcactcgttattacgctgtactgctaa

SEQ ID NO: 220 - DNA, 2946 bp, synthetic construct
  misc_feature 1..2946: note = NK77.84_65-68 construct
  source 1..2946: mol_type = other DNA
atggccttaccagtgaccgccttgctcctgccgctggccttgctgctccacgccgccaggccggactacaaagacgatgacgataaaggcggtggtggctctggtggtggcggatcccaggtgcagctggtgcagtctggggctgaggtgaagaagcctggggcctcagtgaaggtctcctgcaaggcttctggatacaccttcaccgagaatgagatgcactgggtgcgacaggcccctggacaagggcttgagtggatgggatggatcaacccgaacagtggtggcacaaactatgcacagaagtttcagggcagggtcaccatgaccagggacacgtccactagcacagtgtacatggagctgagctctctgagatctgaagacacggccgtgtattactgtgcggggagctggggtggttactactttgactactggggccaagggaccctggtcaccgtctcctcaggtggaggcggttcaggcggaggtggctctggcggtggcggatcggacatccagatgacccagtctccatcctccctgtctgcatctgtaggagacagagtcaccatcacttgccgggcaagtcagagcgttagcagatatttaaattggtatcagcagaaaccagggaaagcccctaagctcctgatctatgatgcatccaatttggaaaccggggtcccatcaaggttcagtggcagtggatctgggacagatttcactctcaccatcagcagtctgcaacctgaagattttgcaacttactactgtcaacaggccgacagtttccctgtgacttttggccaggggaccaagctggagatcaaaggtggcggtggctcgggcggtggtgggtcgggtggcggcggatctcaggtgcagctggtgcagtctggggctgaggtgaagaagcctggggcctcagtgaaggtttcctgcaaggcatctggatacaccttcaccagctactatatgcactgggtgcgacaggcccctggacaagggcttgagtggatgggaataatcaaccctagtgacggaggaacaagctacgcagacaagttccagggcagagtcaccatgaccagggacacgtccacgagcacagtctacatggagctgagcagcctgagatctgaggacacggccgtgtattactgtgctagagcgcttgcccccctgggatggggtgacggcatggatgtctggggccaagggacaacagtcaccgtctcttcaggtggaggcggttcaggcggaggtggctctggcggtggcggatcggacatccagatgacccagtctccatcctccctgtctgcatctgtaggagacagagtcaccatcacttgccaggcgagtcaggacattagcaactatttaaattggtatcagcagaaaccagggaaagcccctaagctcctgatctacgatgcatccaatttggaaacaggggtcccatcaaggttcagtggaagtggatctgggacagattttactctcaccatcagcagcctgcagcctgaagatttcgcaacatattactgtcaacagtcatatgatggacctatcaccttcggccaagggacacgactggagattaaaaccacgacgccagcgccgcggccaccaacaccggcgcccaccatcgcgtcgcagcccctgtccctgcgcccagaggcgtgccggccagcggcggggggcgcagtgcacacgagggggctggacttcgcctgtgatatctacatctgggcgcccttggccgggacttgtggggtccttctcctgtcactggttatcaccctttactgccggagggaccagaggctgccccccgatgcccacaagccccctgggggaggcagtttccggacccccatccaagaggagcaggccgacgcccactccaccctggccaagatcagagtgaagttcagcaggagcgcagacgcccccgcgtaccagcagggccagaaccagctctataacgagctcaatctaggacgaagagaggagtacgatgttttggacaagagacgtggccgggaccctgagatggggggaaagccgagaaggaagaaccctcaggaaggcctgtacaatgaactgcagaaagataagatggcggaggcctacagtgagattgggatgaaaggcgagcgccggaggggcaaggggcacgatggcctttaccagggtctcagtacagccaccaaggacacctacgacgcccttcacatgcaggccctgccccctcgcggctctggcgagggaaggggttccctgcttacttgcggcgacgtcgaagagaatcccggtccgatggccctcccagtaactgccctccttttgcccctcgcactccttcttcatgccgctcgccccaactgggtcaacgtgattagcgatttgaagaaaatcgaggaccttatacagtctatgcatattgacgctacactgtatactgagagtgatgtacacccgtcctgtaaggtaacggccatgaaatgctttcttctggagctccaggtcatcagcttggagtctggggacgcaagcatccacgatacggttgaaaacctcatcatccttgcgaacaactctctctcatctaatggaaacgttacagagagtgggtgtaaggagtgcgaagagttggaagaaaaaaacatcaaagaatttcttcaatccttcgttcacatagtgcaaatgttcattaacacgtccactaccacacccgccccgaggccacctacgccggcaccgactatcgccagtcaacccctctctctgcgccccgaggcttgccggcctgcggctggtggggcggtccacacccggggcctggattttgcgtgcgatatatacatctgggcacctcttgccggcacctgcggagtgctgcttctctcactcgttattacgctgtactgctaa

SEQ ID NO: 221 - DNA, 1521 bp, synthetic construct
  misc_feature 1..1521: note = NK77.76_38-38 scFv codon optimized
  source 1..1521: mol_type = other DNA
caggtgcagctggttcagtccggggccgaagtcaagaagcctggcgcatctgtgaaggtgtcctgtaaagctagcggctactccttcaccagctactacatgcattgggtccgccaggcgccgggacaaggcctggagtggatggggattattaacccctcaggagggacgaccagctacgcgcagaaatttcagggccgcgtaaccatgacgcgcgacacctccacctccaccgtctacatggagctctcctcgcttagatccgaggacaccgccgtgtactactgcgctcgcgacaactccccttactctagtagttggtgggactacttcgactactggggccagggcaccctagttacagtctcctcgggtggtggcggctccggtggcggcggctccggaggtggcggctccgacatccagatgacccagtcgccatcgagcctttcagcttcggtcggggacagggtgactatcacctgccgagcgtcccaggacatccgtcactacctggcctggtatcagcagaagcccggtaaggcacccaagttgctcatctacgacgccagctcgctgcagagcggtgtgccctctcgttttagcggttccggcagcggcaccgacttcaccctgaccatctcttccctgcagccggaggatttcgctacctactactgtcaacagacttacgacgcacccatcaccttcggccagggcactcgactggagatcaagggcggcggcggttctggtgggggcgggtctggcgggggcggtagtcaggtgcaattagtgcagtctggcgccgaggtgaagaagcctggcgccagtgttaaggtgtcctgtaaagcgtccggctactccttcacttcttattacatgcactgggtgcgccaggcccctggtcagggtctcgagtggatgggcataattaatccatctggcggtaccacaagctacgctcagaaatttcaggggcgggttacaatgactcgtgacacctctacctcgaccgtgtacatggagctgtcctcgttgaggagcgaagacactgcggtgtactactgtgcccgcgacaactcgccctatagcagcagctggtgggattacttcgactattggggccagggtactctggtgaccgtgagcagtggcggaggaggctcaggggggggagggagcgggggaggaggctccgacatccagatgacccagagcccttcttctctgtctgcctcagtgggcgatcgcgtcaccatcacctgccgggcttcccaggatatccgccactacctggcgtggtaccagcagaagcccggcaaggccccgaagctgctgatctatgacgcttcctcattgcagagcggcgtaccgtcccgcttctccggctcgggatctggcacggatttcaccctcactatctcctcacttcagccagaggatttcgccacctactattgccaacagacgtacgacgcccccatcaccttcggccagggtacacgcctggagattaag

SEQ ID NO: 222 - DNA, 1521 bp, synthetic construct
  misc_feature 1..1521: note = NK77.77_64-64 scFv codon optimized
  source 1..1521: mol_type = other DNA
caggtgcagctggtgcagagcggagctgaggtgaagaagcccggttctagcgtgaaggtgagctgtaaagcctcgggttacacgttcacaagctatggcatcagttgggtgcgccaggcccccggtcagggcctggagtggatgggcggcatcattcccatcttcggtacgaccaactacgcgcagaagttccagggccgtgtgactatcactgcggacgagagcacctccactgcttacatggagctgtcgtccctgcgctccgaggacaccgccgtgtactactgcgctcgcgatcactccggtgacggctactttgatctttggggccgtggtactctggtgaccgtgtccagcggggggggcggatctggcggtggcggcagcggcggaggaggctccgacattgtcatgacccagtcccctctgtccctcccagttacccccggcgagccagccagcatctcttgccgatcttcccagagcctactccacagcaacggctacaactatttggattggtacctgcagaagccggggcagagccctcagctgttaatctacgacgcctcctccctgcagtcgggagtccccgaccgcttcagcggcagtggctccggcaccgactttaccctgaagatatcccgcgtggaggccgaggacgtgggcgtctactactgcatgcaaggcacccattggcccccaaccttcggccagggcactaaagtcgagatcaagggcggtggaggctcgggcggcggtggctccggcggtgggggttcgcaggtccagcttgtgcagtctggcgcggaggtgaagaagccaggcagcagtgttaaagtatcttgtaaggcatctggatacaccttcaccagctacggcattagttgggtccgccaggccccgggacagggactggagtggatgggcggcatcattcccatcttcggcacgaccaactacgctcagaaatttcaggggcgcgtaaccatcaccgccgacgagtccacttccactgcctacatggaactgtcctcgctgcggtctgaagacacggccgtgtactactgcgcgcgggaccactctggtgatggctatttcgacctttggggcagaggaacgcttgtcaccgtcagctcgggggggggtggttccggcggcgggggctccggcgggggtggcagtgacatcgtgatgacccagagtcctttgtctctgccggtaacaccgggggagcccgcttctatctcttgtcgttcttcacagagcctcctgcattcaaatggctataactacctggactggtacctccagaagcctgggcaatctcctcagctgctgatctatgacgcatcctccttgcagtctggcgttccggacaggttttcaggctccgggtcgggcaccgatttcaccctcaagatctctcgcgtggaggctgaagatgtgggggtgtattactgtatgcagggtacacactggcctcccaccttcggccagggcaccaaggtggagattaag

SEQ ID NO: 223 - DNA, 1485 bp, synthetic construct
  misc_feature 1..1485: note = NK77.78_65-65 scFv codon optimized
  source 1..1485: mol_type = other DNA
caggtccagctggtgcagagcggggcggaggtgaagaagcccggtgcgtccgtaaaggtatcatgcaaagcctcgggctacacgttcacagagaatgagatgcattgggtccgtcaggcccccggccagggcctagagtggatgggctggattaaccctaactcgggaggcaccaactatgcccagaaatttcagggccgcgttacaatgacccgcgacacgtccacgagcaccgtctacatggagctgagttctttgcggtcggaggacaccgccgtgtactactgtgctggtagttggggcggatattacttcgactattggggccaaggcactttagtcaccgtctcctcgggtgggggcggctctggcggaggcggttctggcgggggtggaagcgatatccagatgacccagagccctagctcactctccgcctccgtgggtgatcgtgtgaccatcacctgtcgggcttcccagtccgtgtcccgctacctgaattggtaccaacagaagccgggcaaggcacctaagctgctcatctacgacgcctctaacctggagaccggtgtgccatcgcgtttctccggttccggctcgggtactgatttcaccctgaccatctcgtccctgcagccagaagattttgccacctattactgtcagcaggcggacagcttccccgtgaccttcggccaggggaccaagctggaaattaagggcggcggaggctccgggggcggcggctctggcggggggggctcccaggtgcagctagtgcagtctggcgccgaggtgaagaaacctggcgcttccgtcaaggtgtcatgcaaagcttcaggctacactttcaccgagaacgagatgcactgggtgcgccaggcgccgggccagggcctggagtggatggggtggattaatcccaacagcggtggtacgaactacgcccagaagttccagggacgcgtgactatgaccagagataccagcacatctaccgtgtacatggagctgagtagccttcgctcagaagacactgctgtttactactgcgccggctcttggggcggatactatttcgactactggggacaggggacccttgttaccgtgtcctctggaggcggcggctccggtggtggcggttccggaggcggtggttccgacatccagatgacccagagtccctctagcctgagcgcatccgtgggggacagggtcactatcacctgccgagcgtctcagagcgtgtcccgctacctcaactggtaccagcagaagcctgggaaggctcccaaactgctgatctatgacgcaagcaacctggagactggcgtcccctctcgcttttctgggagcggctcgggcaccgacttcaccctcactatctcctccttgcagccggaggactttgctacctactactgtcaacaggcggactccttcccggtgaccttcggacagggcaccaagttggagatcaag

SEQ ID NO: 224 - DNA, 1530 bp, synthetic construct
  misc_feature 1..1530: note = NK77.79_38-67 scFv codon optimized
  source 1..1530: mol_type = other DNA
caggtgcagctggtgcagagcggagcagaggtgaagaagcctggcgctagtgttaaagtgtcctgtaaggcaagcggctactccttcaccagctactacatgcactgggtccgccaggccccggggcagggcctggagtggatgggcatcatcaatccatcaggggggacaacgagctatgcgcagaaatttcagggtcgcgtcactatgactcgcgacacatcaacctccaccgtgtacatggagctgagctctctgcgcagcgaggacaccgccgtctactactgtgctcgtgacaactccccctacagctcttcttggtgggactatttcgattattggggccagggaaccttggtaactgtgagttctggcggcggaggatcgggaggaggtggctcgggcgggggtggtagcgacatccagatgacccagagcccctctagtctttccgcgtctgtgggagaccgggttaccatcacctgccgagcctcccaggatatccgccactacctggcgtggtaccagcagaagccgggtaaggcccccaagctgctgatttacgacgcttcgagtctgcaatctggtgtcccctcccgcttcagcggctcaggctccggcactgatttcaccctgaccatttctagccttcagccggaggactttgctacctactactgtcaacagacctacgacgcacctatcactttcggtcagggcacccgcctggagatcaagggcggcggcggctccggcggcggcggtagcggtggcgggggtagccaggtccaactggtgcagtctggagcggaggtgaaaaaacctggctccagcgtaaaggtgtcgtgcaaggcctccggcggtaccttctctagctatgccatcagttgggtgcgccaggcgccaggccagggtttggagtggatgggtggcatcacgccgatgtttggcacgacggactacgctcagaagttccagggtcgtgtcactattacagccgacgaatcgacctctaccgcctacatggagctctcctctttgaggtccgaggataccgctgtttattactgcgctcgggacgagcgcgacggctatgccacggtggccttcgacatatggggccaggggacgatggtgacagtgtcctccggtggcggggggagcggtggcggcggctccggaggcggcggttccgacattgtgatgacccagtctcccctgtcccttccggtgactcccggtgagccagcttcaatctcctgtcgctcctcccagtctctactccattcaaacggctacaactacctcgattggtacctgcagaagcccgggcagtcgcctcagctactcatctacgatgccagcaacctggaaaccggcgtccccgacaggttttcgggctccgggtcgggcaccgacttcactctgaagatctctcgtgtggaggccgaagatgtgggcgtctactactgcatgcagggcacccactggccccctaccttcggccagggcaccaaggtggagatcaag

SEQ ID NO: 225 - DNA, 1515 bp, synthetic construct
  misc_feature 1..1515: note = NK77.80_38-68 scFv codon optimized
  source 1..1515: mol_type = other DNA
caggtccagctggtgcagtctggcgccgaggtgaagaagcctggggccagtgttaaggtctcatgtaaagcatccggctactcctttaccagctactatatgcattgggtccggcaggccccggggcaggggctagagtggatgggcatcataaacccatcaggtggcaccacgagctacgcacagaagttccagggtagagttaccatgactcgcgacacctctacctccaccgtgtacatggagctctcctccctccgctcggaggacacggccgtatactactgtgcccgtgacaactccccctattcctcgagctggtgggattatttcgactattggggccagggcactctggtgacagtgtccagtgggggaggagggtctggcggtggcggctcgggcggcggcggtagcgacatccagatgacccagagcccgagctctctgtccgcctccgtgggcgatcgggtcaccatcacctgccgagcgtcccaggacatccgccactacttggcttggtatcagcagaagcctggtaaggcccccaaattattgatctacgacgcttcgtccctccagtcgggcgtgccttcccgtttcagtggctcgggatcaggcaccgatttcacccttacaatctcgtctctgcagccggaggactttgccacctactactgccaacagacgtacgatgcacccatcaccttcggccagggaacccgcctggagattaagggtggtggaggttctggcggcgggggctccggcggaggtggttcacaggtgcagctggtgcaaagtggagcggaagtgaagaagccgggcgcgagcgtcaaggtgtcatgcaaagcctctggctacactttcacgagttactacatgcactgggtgcgccaggccccgggacagggcctggagtggatgggcattatcaatccatccgatggcggcacatcgtacgcggacaaatttcagggccgcgtgaccatgaccagggacaccagtacttctaccgtgtacatggagctgtcctccctgcgcagcgaagacacggcggtgtactactgtgctcgcgccctggcgcctttgggctggggcgatggaatggacgtgtggggtcagggtactaccgtcaccgtgtcctctggaggcgggggctctgggggcggtggctccggcgggggtgggagtgacatccagatgacccagtccccaagctctctttccgcctccgtgggggacagggtcaccattacctgtcaggctagccaggatatctcgaactacctcaactggtaccagcagaagcccggcaaggctcccaagctgctgatttacgacgccagcaacctggagaccggcgttccctcccgcttctctggtagcggctccggcacggacttcaccctgaccatctcttcgctacagcctgaggactttgctacgtactactgccaacagagctatgacggccccatcaccttcggccagggcacccgtctggagatcaag

SEQ ID NO: 226 - DNA, 1530 bp, synthetic construct
  misc_feature 1..1530: note = NK77.81_64-67 scFv codon optimized
  source 1..1530: mol_type = other DNA
caggtgcagctggtgcagagcggagcagaggtgaagaagcccggctcgtccgtgaaggtgtcctgtaaagcttctggatacaccttcaccagctacggcattagttgggttcgccaggccccggggcagggtctggagtggatgggaggcattatccccatcttcggaacgaccaactatgcccagaaatttcagggcagagtcaccatcactgcggacgagagcacctccaccgcctacatggagctgtcttctctgcgctctgaagataccgccgtgtactactgtgcccgcgaccactctggtgatggctatttcgacctttggggtcgcggcactctggtgaccgtgtcctctgggggcgggggttccggcggaggcggctccggtggcggaggctctgacatcgtgatgacccagagcccactgtcgctgcccgtcacaccgggggagcctgcttccatctcatgccgatcctcccagagtctcttacactctaatggctacaactacctggactggtacctgcagaagcctggccagagcccacagctgcttatctacgacgcctcgtctttgcagagtggcgtgcccgaccgcttctctggcagtggttcaggcaccgatttcaccctgaagatctcgcgcgtggaggctgaggatgtgggcgtctactactgcatgcaggggactcactggcctcccacttttgggcagggaacaaaagtggagatcaagggcggaggcggcagcggcggcggaggaagcggaggcggagggtcacaggtccagttggtgcagagtggcgcggaagtcaagaaacctggctccagcgtcaaggtttcctgtaaggctagcgggggcacgttcagtagctacgctatctcctgggtgcgccaggcccccggtcagggtctcgaatggatgggcggcatcactccaatgtttggcaccacagattacgcgcagaagttccagggaagggtgactatcaccgccgacgagagcaccagcactgcgtacatggagctgagctccctgcgctcggaggacaccgctgtctattattgtgctcgtgacgagcgggacggctacgccactgtagccttcgacatctggggccagggcactatggtaaccgtatcgtcgggagggggaggctccggtggcgggggttccggtgggggtgggtccgacattgtgatgacccagtcccccctcagcctgccggtaacaccgggtgagccagcatctatctcctgccggtcctcccaatctctcctgcactccaacggctacaactacttggattggtacctacagaagccggggcagtcacctcagctgcttatctacgacgcaagcaacctggagaccggcgttcccgacaggttctctggctcgggctctggcacggactttacgctaaagatatcccgtgtcgaggccgaggacgtgggggtgtactattgcatgcaaggtacgcattggccccctaccttcggtcaaggcaccaaggtggagattaag

SEQ ID NO: 227 - DNA, 1515 bp, synthetic construct
  misc_feature 1..1515: note = NK77.82_64-68 scFv codon optimized
  source 1..1515: mol_type = other DNA
caggtgcagctcgtgcagtcgggggccgaggttaaaaagcctggttccagcgtcaaagtctcctgtaaggcctctggctacaccttcaccagctacggcatcagttgggtccgccaggccccgggccagggccttgagtggatggggggcatcatccccatcttcgggacgaccaactacgcgcagaagttccagggaagagttacgatcacggcggacgagagcacctccaccgcttacatggagctgtcctccctccgtagcgaggatacagccgtgtactactgcgcccgggaccactccggtgatggctatttcgacctttggggccgtggcactttggtgactgtgagttctggcggcggcggtagcggagggggtggctcaggaggtggtggaagtgacatcgtgatgacccagagccctttatccctgccggtgactccgggcgagccagcttctatctcctgccgaagctcacagtcgctgctccattccaatggttacaactacttggattggtacctgcagaagcccggccagagccctcagctgctcatctatgacgcctcgtcccttcaatcaggcgtccccgacaggttttctggctctggatctggcaccgactttaccctgaagatatcccgcgtggaggctgaagatgtgggcgtgtactactgtatgcagggcacacactggcccccaacctttggccagggcaccaaggtggagatcaaaggcggcgggggttctgggggtggcggctccggtggaggcggctcccaggtccagctggtgcagtcgggggcagaggtgaagaagccgggcgcgtccgtgaaggtatcatgtaaggcttccggatacaccttcaccagctattacatgcactgggtgcgccaggctcccgggcaagggctggagtggatgggcattattaacccctctgacggcggcactagctacgcggacaaatttcagggacgggtaacaatgactcgcgacacgtccactagcaccgtctacatggaactgtcgtccctacgctcggaggacaccgcagtgtattactgtgcccgtgcgctggcgcccctgggctggggcgatggaatggatgtatggggccaaggcacgaccgtcaccgtgagctctgggggtggaggttcgggtggtgggggttctggtggtggcgggtccgacatccagatgacccagagcccaagctccctgtccgcctctgtcggggaccgcgtgaccatcacctgccaggcctcccaggacatctccaactatcttaactggtaccagcagaagcctggcaaggctcctaagctgctgatttacgacgcaagcaacctggagactggagtgccctctcgcttctcgggaagtggctctggaactgatttcactctgaccatcagctccttgcagccagaggacttcgccacctactattgccagcagtcttacgacggccccatcaccttcggccaggggacccgcctggagattaag

SEQ ID NO: 228 - DNA, 1512 bp, synthetic construct
  misc_feature 1..1512: note = NK77.83_65-67 scFv codon optimized
  source 1..1512: mol_type = other DNA
caggtgcagctggtgcagagcggcgctgaggtgaagaaacctggcgcgtccgtcaaggtgtcctgtaaggcctctggctacaccttcaccgagaacgagatgcactgggtgcgccaggcccctggtcagggcctcgagtggatggggtggattaatcccaactccggcggcaccaactacgcgcagaagttccagggccgcgtgactatgacccgcgacacttccacctccaccgtgtacatggagctgtcctccctacgttccgaggacacggccgtgtactactgcgctggcagttggggcggctattacttcgattattggggccaggggactctggtgactgtctcttccggagggggaggatcgggcggcgggggttcaggtggcggcggaagcgatatccagatgactcagtcaccttctagcctgtctgctagcgtaggcgacagggtgaccatcacctgccgagcttctcagtccgtgagccgctacctcaactggtaccagcagaagccaggcaaagcccccaagctgctcatctacgacgcgtctaatctggagacgggtgtcccgtcccgcttttcaggctcgggttctgggacagatttcaccctgaccatctcttctcttcagccggaggacttcgcaacctactactgccaacaggcggattccttccccgtgaccttcggacagggcaccaagctcgagattaagggcggcggcggctcgggtggtgggggctccggagggggaggttcccaggtccagttggtgcagtcgggcgccgaagttaagaagcccgggtcgtccgtcaaggtgtcatgcaaggcatccggtggcactttttctagctacgccatcagttgggtgcgtcaggctcctgggcagggtctggagtggatgggcggcatcacccccatgtttggcacaaccgactacgctcagaagttccagggcagagtcaccatcacagcggacgagagcaccagcaccgcctacatggagctgtcgtcactgcgtagcgaagacaccgcagtgtattactgtgcccgggacgagcgcgacggctatgccacggtggccttcgacatctggggccagggtactatggtgaccgtatcttccggtgggggcggctccggcggtggtggcagtgggggaggaggctccgacatcgtgatgacccagtccccgctttcgctgcccgttacgcccggcgagccagcttctatctcgtgtcggtcttcccagagcttacttcatagcaacggctataactacttggattggtacctgcagaagccgggtcaatctcctcagctgctgatttatgacgccagcaacctggaaaccggtgtgcccgaccgcttcagcggctccggcagcggtaccgactttacgctgaagataagtcgcgtcgaggccgaggatgtaggcgtctactactgtatgcagggaacgcactggcccccaaccttcggccaagggaccaaagtggagatcaaa

SEQ ID NO: 229 - DNA, 1497 bp, synthetic construct
  misc_feature 1..1497: note = NK77.84_65-68 scFv codon optimized
  source 1..1497: mol_type = other DNA
caggtccagctggtgcagtccggtgctgaggtgaagaagcctggggcatcggtgaaggtgtcatgcaaggcctcgggctacaccttcaccgagaacgagatgcactgggtgcgccaggcgcccggacagggcctggaatggatggggtggattaatccaaactccggcggcaccaactatgcgcagaaatttcagggacgggtcactatgactcgcgacacctccacctccacagtctacatggagctctcaagtttacggtccgaggacacggccgtgtactactgtgctggaagttggggcggctattatttcgactattggggccaaggcaccttggttaccgtgtcctccgggggcggaggttctggcggcggcggcagcggtggcggggggagcgatatccagatgacccagtcaccaagctcgctgtccgcctccgtgggggacagagtcacaattacctgccgagcatcacaatccgtatctcgctacctgaattggtaccagcagaagccgggcaaggcccctaagctgctgatttacgacgcctccaacctagagactggcgtcccctctaggttttcagggtctggaagcggcactgatttcaccctgaccatctcctctctgcagccggaggactttgccacctactactgccagcaggcggactccttcccggtgaccttcggtcagggcaccaagctcgagatcaaaggcggtggcggatcgggcggtggtgggtctggaggtggaggttctcaggtgcagttggtgcagagcggcgctgaggtgaagaagcccggtgcctccgttaaggtgtcatgcaaagcttctggttacacgttcaccagctattacatgcattgggtccgtcaggccccgggacagggccttgagtggatgggcatcatcaaccccagtgacggcggcacgtcttacgcggacaagttccagggccgtgtaactatgacgcgcgacacctctacgtcgaccgtctacatggagctctcttctctgcgcagcgaagacaccgccgtgtactactgtgctcgcgcgctggcccccctgggctggggcgacggtatggacgtgtggggccagggcacgacagtgaccgtgagttccgggggcggcgggtccggtgggggcggttccggcggcggtggttccgacatccagatgacccagagcccttcttctctttccgcgtctgtgggtgatcgtgttactatcacctgtcaggcttcccaggacatcagcaactacctcaactggtaccaacagaagcccggcaaagcccccaagctgctcatctacgacgcttccaacctggagaccggcgtcccttcccgcttcagcggctcgggctccgggaccgacttcactctgaccatctctagcttgcagccagaggattttgccacttactactgtcagcagagctacgatgggcccatcacattcggacagggcacccgcctggagataaag

SEQ ID NO: 230 - protein, 240 aa, synthetic construct
  REGION 1..240: note = NK77.1_CD70_DB01_C03 scFv
QVQLVQSGAEVKKPGASVKVSCKASGYTFTGHYLHWVRQAPGQGLEWMGWINPNSGGTNYAQKFQGRVTMTRDTSTSTVYMELSSLRSEDTAVYYCVRGSGWYDLDYWGQGTLVTVSSGGGGSGGGGSGGGGSDIQMTQSPSSLSASVGDRVTITCRASQNIGTYLAWYQQKPGKAPKLLIYDASNLETGVPSRFSGSGSGTDFTLTISSLQPEDFATYYCQQSYRIPLTFGQGTRLEIK

SEQ ID NO: 231 - protein, 241 aa, synthetic construct
  REGION 1..241: note = NK77.2_CD70_DB01_D02 scFv
QVQLVQSGAEVKKPGASVKVSCKASGYTFTNYYMHWVRQAPGQGLEWMGIINPSGGSTSYAQKFQGRVTMTRDTSTSTVYMELSSLRSEDTAVYYCARELGVAGYFDLWGRGTLVTVSSGGGGSGGGGSGGGGSDIQMTQSPSSLSASVGDRVTITCRASQRISNWLAWYQQKPGKAPKLLIYDASNLETGVPSRFSGSGSGTDFTLTISSLQPEDFATYYCQQTYSPPPTFGQGTKLEIK

SEQ ID NO: 232 - protein, 250 aa, synthetic construct
  REGION 1..250: note = NK77.3_CD70_DB01_E06 scFv
QVQLVQSGAEVKKPGASVKVSCKASGYTFTGYYIHWVRQAPGQGLEWMGIINPSGGSTSYAQKFQGRVTMTRDTSTSTVYMELSSLRSEDTAVYYCARDLSGIDGYIGFFDYWGQGTLVTVSSGGGGSGGGGSGGGGSDIVMTQSPLSLPVTPGEPASISCRSSQSLLHSNGYNYLDWYLQKPGQSPQLLIYAASSLQSGVPDRFSGSGSGTDFTLKISRVEAEDVGVYYCMQALQTPITFGQGTRLEIK

SEQ ID NO: 233 - protein, 241 aa, synthetic construct
  REGION 1..241: note = NK77.4_CD70_DB01_G04 scFv
QVQLVQSGAEVKKPGASVKVSCKASGGTFRSHVISWVRQAPGQGLEWMGIIDPSGGSTSYAQRFQGRVTMTRDTSTSTVYMELSSLRSEDTAVYYCAKDYTGLLGMDVWGQGTTVTVSSGGGGSGGGGSGGGGSDIQMTQSPSSLSASVGDRVTITCRASQDIDTYLAWYQQKPGKAPKLLIYAASSLQSGVPSRFSGSGSGTDFTLTISSLQPEDFATYYCQQSYTTPFTFGQGTKVEIK

SEQ ID NO: 234 - protein, 241 aa, synthetic construct
  REGION 1..241: note = NK77.5_CD70_DB01_G05 scFv
QVQLVQSGAEVKKPGASVKVSCKASGYTFIDYYIHWVRQAPGQGLEWMGWMNPNSGNTGYAQKFQGRVTMTRDTSTSTVYMELSSLRSEDTAVYYCARGLSGYDLDDYWGQGTLVTVSSGGGGSGGGGSGGGGSDIQMTQSPSSLSASVGDRVTITCQASQDISNYLNWYQQKPGKAPKLLIYDASSLESGVPSRFSGSGSGTDFTLTISSLQPEDFATYYCQQSYRSPLTFGGGTKVEIK

SEQ ID NO: 235 - protein, 240 aa, synthetic construct
  REGION 1..240: note = NK77.6_CD70_DB01_G07 scFv
QVQLVQSGAEVKKPGASVKVSCKASGYTFTSYYMHWVRQAPGQGLEWMGWINPNSGGTKYAHKFQGRVTMTRDTSTSTVYMELSSLRSEDTAVYYCARGLSGYDFDYWGQGTTVTVSSGGGGSGGGGSGGGGSDIQMTQSPSSLSASVGDRVTITCQASQDISNYLNWYQQKPGKAPKLLIYDASNLETGVPSRFSGSGSGTDFTLTISSLQPEDFATYYCQQAYRWPITFGQGTRLEIK

SEQ ID NO: 236 - protein, 241 aa, synthetic construct
  REGION 1..241: note = NK77.7_CD70_DB01_G11 scFv
QVQLVQSGAEVKKPGASVKVSCKASGYTFTGYYMHWVRQAPGQGLEWMGWMNPNSGNTGYAQKFQGRVTMTRDTSTSTVYMELSSLRSEDTAVYYCARGTDVYGDFDYWGQGTLVTVSSGGGGSGGGGSGGGGSDIQMTQSPSSLSASVGDRVTITCRASQSISSYLNWYQQKPGKAPKLLIYDASYLETGVPSRFSGSGSGTDFTLTISSLQPEDFATYYCQQSYTIPPTFGQGTKVEIK

SEQ ID NO: 237 - protein, 248 aa, synthetic construct
  REGION 1..248: note = NK77.9_CD70_DB02_A03 scFv
QVQLVQSGAEVKKPGSSVKVSCKASGYTFTENEMHWVRQAPGQGLEWMGGIIPIFGTANYAQKFQGRVTITADESTSTAYMELSSLRSEDTAVYYCAREGGTAMATGYYYYGMDVWGQGTTVTVSSGGGGSGGGGSGGGGSDIQMTQSPSSLSASVGDRVTITCQASQDISNYLNWYQQKPGKAPKLLIYDASNLETGVPSRFSGSGSGTDFTLTISSLQPEDFATYYCQQSYSTPLTFGQGTKVEIK

SEQ ID NO: 238 - protein, 246 aa, synthetic construct
  REGION 1..246: note = NK77.10_CD70_DB02_A04 scFv
QVQLVQSGAEVKKPGASVKVSCKASGYTFTENEMHWVRQAPGQGLEWMGWINSNGGYTGYALKFQGRVTMTRDTSTSTVYMELSSLRSEDTAVYYCARASNYGGHFDYWGQGTLVTVSSGGGGSGGGGSGGGGSDIVMTQSPLSLPVTPGEPASISCRSSQSLLHSNGYNYLDWYLQKPGQSPQLLIYQASSLESGVPDRFSGSGSGTDFTLKISRVEAEDVGVYYCMQGTHWPPTFGGGTKVEIK

SEQ ID NO: 239 - protein, 241 aa, synthetic construct
  REGION 1..241: note = NK77.11_CD70_DB02_A05 scFv
QVQLVQSGAEVKKPGASVKVSCKASGYTFTSYYMHWVRQAPGQGLEWMGIINPSGGSTIYAQKFQGRVTMTRDTSTSTVYMELSSLRSEDTAVYYCAKDMGAWAAGFDYWGQGTLVTVSSGGGGSGGGGSGGGGSDIQMTQSPSSLSASVGDRVTITCQASQDISNYLNWYQQKPGKAPKLLIYATSTLANGVPSRFSGSGSGTDFTLTISSLQPEDFATYYCQQSYSTLTFGQGTRLEIK

SEQ ID NO: 240 - protein, 242 aa, synthetic construct
  REGION 1..242: note = NK77.12_CD70_DB02_A06 scFv
QVQLVQSGAEVKKPGASVKVSCKASGYTFTGYYMHWVRQAPGQGLEWMGWINPNSGDTGYAQKFQGRVTMTRDTSTSTVYMELSSLRSEDTAVYYCARSVNDYGDYDGYWGQGTLVTVSSGGGGSGGGGSGGGGSDIQMTQSPSSLSASVGDRVTITCQASQDISNYLNWYQQKPGKAPKLLIYDASNLETGVPSRFSGSGSGTDFTLTISSLQPEDFATYYCQQSYSTPPTFGQGTKVEIK

SEQ ID NO: 241 - protein, 242 aa, synthetic construct
  REGION 1..242: note = NK77.13_CD70_DB02_A07 scFv
QVQLVQSGAEVKKPGASVKVSCKASGYTFTGYYMHWVRQAPGQGLEWMGIINPSGGSTSYAQKFQGRVTMTRDTSTSTVYMELSSLRSEDTAVYYCARDYGDYDASFDYWGQGTLVTVSSGGGGSGGGGSGGGGSDIQMTQSPSSLSASVGDRVTITCRASQSIDNWLAWYQQKPGKAPKLLIYAASTLQSGVPSRFSGSGSGTDFTLTISSLQPEDFATYYCQQSYDSPPTFGQGTKLEIK

SEQ ID NO: 242 - protein, 239 aa, synthetic construct
  REGION 1..239: note = NK77.14_CD70_DB02_A08 scFv
QVQLVQSGAEVKKPGASVKVSCKASGYTFTSYDINWVRQAPGQGLEWMGIINPSDGSTIYAQNFQGRVTMTRDTSTSTVYMELSSLRSEDTAVYYCVKEEAWYFDLWGRGTLVTVSSGGGGSGGGGSGGGGSDIQMTQSPSSLSASVGDRVTITCQASQDISNYLNWYQQKPGKAPKLLIYDASNLETGVPSRFSGSGSGTDFTLTISSLQPEDFATYYCQQSYSTPLTFGGGTKVEIK

SEQ ID NO: 243 - protein, 239 aa, synthetic construct
  REGION 1..239: note = NK77.15_CD70_DB02_A09 scFv
QVQLVQSGAEVKKPGASVKVSCKASGYTFTSYYMHWVRQAPGQGLEWMGWMNPDNGDTGYAQMFQGRVTMTRDTSTSTVYMELSSLRSEDTAVYYCASGDYYDILYWGQGTLVTVSSGGGGSGGGGSGGGGSDIQMTQSPSSLSASVGDRVTITCQASQDISNYLNWYQQKPGKAPKLLIYDVSNLETGVPSRFSGSGSGTDFTLTISSLQPEDFATYYCQQANSFPLTFGGGTKVEIK

SEQ ID NO: 244 - protein, 240 aa, synthetic construct
  REGION 1..240: note = NK77.16_CD70_DB02_A11 scFv
QVQLVQSGAEVKKPGASVKVSCKASGYTFTSYYMHWVRQAPGQGLEWMGWMNPNSGDTGYAQKFQGRVTMTRDTSTSTVYMELSSLRSEDTAVYYCARGPSGYEFDYWGQGTLVTVSSGGGGSGGGGSGGGGSDIQMTQSPSSLSASVGDRVTITCRASQTISNYLNWYQQKPGKAPKLLIYDASSLESGVPSRFSGSGSGTDFTLTISSLQPEDFATYYCQQAISFPLTFGGGTKVEIK

SEQ ID NO: 245 - protein, 244 aa, synthetic construct
  REGION 1..244: note = NK77.17_CD70_DB02_B06 scFv
QVQLVQSGAEVKKPGASVKVSCKASGYTFTDYYMHWVRQAPGQGLEWMGIINPNSGGTNYAQKFQGRVTMTRDTSTSTVYMELSSLRSEDTAVYYCARDFSVYAAADGMDVWGQGTLVTVSSGGGGSGGGGSGGGGSDIQMTQSPSSLSASVGDRVTITCRASQSISSYLNWYQQKPGKAPKLLIYDASNLATGVPSRFSGSGSGTDFTLTISSLQPEDFATYYCQQSDSSPLTFGQGTKVEIK

SEQ ID NO: 246 - protein, 243 aa, synthetic construct
  REGION 1..243: note = NK77.18_CD70_DB02_B09 scFv
QVQLVQSGAEVKKPGASVKVSCKASGYTFTGYYMHWVRQAPGQGLEWMGIINPGDGGTIYAQNFQGRVTMTRDTSTSTVYMELSSLRSEDTAVYYCARGFGESAPDAFDIWGQGTMVTVSSGGGGSGGGGSGGGGSDIQMTQSPSSLSASVGDRVTITCQASQDISNYLNWYQQKPGKAPKLLIYGATTLQSGVPSRFSGSGSGTDFTLTISSLQPEDFATYYCQQADSFPYTFGQGTKLEIK

SEQ ID NO: 247 - protein, 240 aa, synthetic construct
  REGION 1..240: note = NK77.19_CD70_DB02_C03 scFv
QVQLVQSGAEVKKPGASVKVSCKASGYTFTGYYMHWVRQAPGQGLEWMGIINPSGGSTSYAQKFQGRVTMTRDTSTSTVYMELSSLRSEDTAVYYCAAGTEIYYMDVWGKGTTVTVSSGGGGSGGGGSGGGGSDIQMTQSPSSLSASVGDRVTITCRASQTIDIYLNWYQQKPGKAPKLLIYDASNLETGVPSRFSGSGSGTDFTLTISSLQPEDFATYYCQQADSFPLTFGGGTKVEIK

SEQ ID NO: 248 - protein, 249 aa, synthetic construct
  REGION 1..249: note = NK77.20_CD70_DB02_C04 scFv
QVQLVQSGAEVKKPGASVKVSCKASGGTFSSYAISWVRQAPGQGLEWMGMINPSDGATTYAQKFQGRVTMTRDTSTSTVYMELSSLRSEDTAVYYCARERELLHFATNYYYYGMDVWGQGTTVTVSSGGGGSGGGGSGGGGSDIQMTQSPSSLSASVGDRVTITCRASQGISNNLNWYQQKPGKAPKLLIYAASSLHSGVPSRFSGSGSGTDFTLTISSLQPEDFATYYCQQADAFPLTFGGGTKVEIK

SEQ ID NO: 249 - protein, 245 aa, synthetic construct
  REGION 1..245: note = NK77.22_CD70_DB02_C07 scFv
QVQLVQSGAEVKKPGASVKVSCKASGYTFTRNYMHWVRQAPGQGLEWMGWISPDNGVTNYAQNFQGRVTMTRDTSTSTVYMELSSLRSEDTAVYYCAKTQGSSSWYQWYFDLWGRGTLVTVSSGGGGSGGGGSGGGGSDIQMTQSPSSLSASVGDRVTITCRASQSIGTWLAWYQQKPGKAPKLLIYAASSLQSGVPSRFSGSGSGTDFTLTISSLQPEDFATYYCQQSYTTPITFGQGTKVEIK

SEQ ID NO: 250 - protein, 241 aa, synthetic construct
  REGION 1..241: note = NK77.24_CD70_DB02_D02 scFv
QVQLVQSGAEVKKPGASVKVSCKASGYTFTSYYMHWVRQAPGQGLEWMGIIDPGSGDTSYAQKFQGRVTMTRDTSTSTVYMELSSLRSEDTAVYYCARGSNWYDYFDYWGQGTLVTVSSGGGGSGGGGSGGGGSEIVMTQSPATLSVSPGERATLSCRASQSVSSYLAWYQQKPGQAPRLLIYGASTRATGIPARFSGSGSGTEFTLTISSLQSEDFAVYYCQQYDSYPPTFGGGTKVEIK

SEQ ID NO: 251 - protein, 241 aa, synthetic construct
  REGION 1..241: note = NK77.25_CD70_DB02_D04 scFv
QVQLVQSGAEVKKPGASVKVSCKASGYRLSDHYMHWVRQAPGQGLEWMGIINPSGGSTTYAQNFQGRVTMTRDTSTSTVYMELSSLRSEDTAVYYCASSYYGDYVLVNWGQGTLVTVSSGGGGSGGGGSGGGGSDIQMTQSPSSLSASVGDRVTITCQASQDISNYLNWYQQKPGKAPKLLIYAASTLESGVPSRFSGSGSGTDFTLTISSLQPEDFATYYCLQDYDYPLTFGQGTKLEIK

SEQ ID NO: 252 - protein, 242 aa, synthetic construct
  REGION 1..242: note = NK77.26_CD70_DB02_D10 scFv
QVQLVQSGAEVKKPGASVKVSCKASGYTFTDYYVHWVRQAPGQGLEWMGWINPNTGGTSFAQNFQGRVTMTRDTSTSTVYMELSSLRSEDTAVYYCARDLGQWLGEIDYWGQGTLVTVSSGGGGSGGGGSGGGGSDIQMTQSPSSLSASVGDRVTITCRASQTIYKWLAWYQQKPGKAPKLLIYDASSLESGVPSRFSGSGSGTDFTLTISSLQPEDFATYYCQQANSFPFTFGPGTKVDIK

SEQ ID NO: 253 - protein, 246 aa, synthetic construct
  REGION 1..246: note = NK77.27_CD70_DB02_D11 scFv
QVQLVQSGAEVKKPGASVKVSCKASGYTFTDYTDYFVHWVRQAPGQGLEWMGIFNPSDGSTSYAQEFQGRVTMTRDTSTSTVYMELSSLRSEDTAVYYCARGPYSSSWYYFDYWGQGTLVTVSSGGGGSGGGGSGGGGSDIQMTQSPSSLSASVGDRVTITCQASQDISNYLNWYQQKPGKAPKLLIYDASNLETGVPSRFSGSGSGTDFTLTISSLQPEDFATYYCQQAHSFPPTFGQGTKVEIK

SEQ ID NO: 254 - protein, 242 aa, synthetic construct
  REGION 1..242: note = NK77.28_CD70_DB02_E04 scFv
QVQLVQSGAEVKKPGASVKVSCKASGYIFTDYYMHWVRQAPGQGLEWMGIINPSGGDTLYAQKFQGRVTMTRDTSTSTVYMELSSLRSEDTAVYYCAREGVGAMGVFDYWGQGTLVTVSSGGGGSGGGGSGGGGSDIQMTQSPSSLSASVGDRVTITCRASTSISDYVHWYQQKPGKAPKLLIYDASSLQSGVPSRFSGSGSGTDFTLTISSLQPEDFATYYCQQSDSTPPTFGGGTKVEIK

SEQ ID NO: 255 - protein, 244 aa, synthetic construct
  REGION 1..244: note = NK77.29_CD70_DB02_F06 scFv
QVQLVQSGAEVKKPGASVKVSCKASGYTFTDHYIHWVRQAPGQGLEWMGWISAYNGKTNYAQKFQGRVTMTRDTSTSTVYMELSSLRSEDTAVYYCARDTIYYDFWSGYDYWGQGTLVTVSSGGGGSGGGGSGGGGSDIQMTQSPSSLSASVGDRVTITCRASQGISNNLNWYQQKPGKAPKLLIYYASTLQSGVPSRFSGSGSGTDFTLTISSLQPEDFATYYCQQSYSTPITFGQGTRLEIK

SEQ ID NO: 256 - protein, 244 aa, synthetic construct
  REGION 1..244: note = NK77.31_CD70_DB02_F08 scFv
QVQLVQSGAEVKKPGASVKVSCKASGYTFTSYYMHWVRQAPGQGLEWMGIINPSGGATIYAQKFQGRVTMTRDTSTSTVYMELSSLRSEDTAVYYCARSRGDYYGSGDFDYWGQGTLVTVSSGGGGSGGGGSGGGGSDIQMTQSPSSLSASVGDRVTITCRASQTISNYLNWYQQKPGKAPKLLIYDASTLEAGVPSRFSGSGSGTDFTLTISSLQPEDFATYYCQQSYNPPYTFGQGTKLEIK

SEQ ID NO: 257 - protein, 240 aa, synthetic construct
  REGION 1..240: note = NK77.32_CD70_DB02_G07 scFv
QVQLVQSGAEVKKPGASVKVSCKASGYTFTDYYMHWVRQAPGQGLEWMGIINPSGGSTSYAQKFQGRVTMTRDTSTSTVYMELSSLRSEDTAVYYCARGYFDHAFDIWGQGTMVTVSSGGGGSGGGGSGGGGSDIQMTQSPSSLSASVGDRVTITCRASQSISTYLNWYQQKPGKAPKLLIYDASNLEIGVPSRFSGSGSGTDFTLTISSLQPEDFATYYCQQSDSSPLTFGQGTKVEIK

SEQ ID NO: 258 - protein, 246 aa, synthetic construct
  REGION 1..246: note = NK77.33_CD70_DB02_H04 scFv
QVQLVQSGAEVKKPGASVKVSCKASGYTFTGYYMHWVRQAPGQGLEWMGIINPSGGDTIYAQKFQGRVTMTRDTSTSTVYMELSSLRSEDTAVYYCARGDSSSWYDYYYYMDVWGKGTTVTVSSGGGGSGGGGSGGGGSDIQMTQSPSSLSASVGDRVTITCQASQDISNYLNWYQQKPGKAPKLLIYAASSLQSGVPSRFSGSGSGTDFTLTISSLQPEDFATYYCQQSYRTPLTFGGGTKVEIK

SEQ ID NO: 259 - protein, 241 aa, synthetic construct
  REGION 1..241: note = NK77.34_CD70_DB02_H05 scFv
QVQLVQSGAEVKKPGASVKVSCKASGYTFTDYFTHWVRQAPGQGLEWMGWINTYDGNTNYAQKFQGRVTMTRDTSTSTVYMELSSLRSEDTAVYYCAREMEWLGQVDYWGQGTLVTVSSGGGGSGGGGSGGGGSDIQMTQSPSSLSASVGDRVTITCRASQDIRNDLGWYQQKPGKAPKLLIYAASNLETGVPSRFSGSGSGTDFTLTISSLQPEDFATYYCQQSYSAPFTFGPGTKVDIK

SEQ ID NO: 260 - protein, 241 aa, synthetic construct
  REGION 1..241: note = NK77.35_CD70_DB02_H08 scFv
QVQLVQSGAEVKKPGASVKVSCKASGYTFTSYYIHWVRQAPGQGLEWMGRINPNGGGTNYAQKFQGRVTMTRDTSTSTVYMELSSLRSEDTAVYYCARGHRGGGGIDYWGQGTLVTVSSGGGGSGGGGSGGGGSDIQMTQSPSSLSASVGDRVTITCRASQEISNYLAWYQQKPGKAPKLLIYDASNLQTGVPSRFSGSGSGTDFTLTISSLQPEDFATYYCQQSYSTPFTFGPGTKVDIK

SEQ ID NO: 261 - protein, 241 aa, synthetic construct
  REGION 1..241: note = NK77.36_CD70_DB03_A06 scFv
QVQLVQSGAEVKKPGASVKVSCKASGGTFSSYAISWVRQAPGQGLEWMGWISPNSGDTHYAQKFQGRVTMTRDTSTSTVYMELSSLRSEDTAVYYCARDWGSGWYVDYWGQGTLVTVSSGGGGSGGGGSGGGGSDIQMTQSPSSLSASVGDRVTITCQASQDISDSLNWYQQKPGKAPKLLIYSASSLQSGVPSRFSGSGSGTDFTLTISSLQPEDFATYYCQQSFTTPYTFGQGTKVEIK

SEQ ID NO: 262 - protein, 241 aa, synthetic construct
  REGION 1..241: note = NK77.37_CD70_DB03_A07 scFv
QVQLVQSGAEVKKPGSSVKVSCKASGGTFNSYGISWVRQAPGQGLEWMGGIIPIFGTANYAQKFQGRVTITADESTSTAYMELSSLRSEDTAVYYCARDTYGDDAFDIWGQGTMVTVSSGGGGSGGGGSGGGGSDIQMTQSPSSLSASVGDRVTITCRASQSISSWLAWYQQKPGKAPKLLIYDASNLETGVPSRFSGSGSGTDFTLTISSLQPEDFATYYCQQNFSPPLTFGQGTRLEIK

SEQ ID NO: 263 - protein, 246 aa, synthetic construct
  REGION 1..246: note = NK77.38_CD70_DB03_A08 scFv
QVQLVQSGAEVKKPGASVKVSCKASGYSFTSYYMHWVRQAPGQGLEWMGIINPSGGTTSYAQKFQGRVTMTRDTSTSTVYMELSSLRSEDTAVYYCARDNSPYSSSWWDYFDYWGQGTLVTVSSGGGGSGGGGSGGGGSDIQMTQSPSSLSASVGDRVTITCRASQDIRHYLAWYQQKPGKAPKLLIYDASSLQSGVPSRFSGSGSGTDFTLTISSLQPEDFATYYCQQTYDAPITFGQGTRLEIK

SEQ ID NO: 264 - protein, 244 aa, synthetic construct
  REGION 1..244: note = NK77.39_CD70_DB03_A09 scFv
QVQLVQSGAEVKKPGASVKVSCKASGYTFTDYYIHWVRQAPGQGLEWMGWITPNSGYTYYAQNFQGRVTMTRDTSTSTVYMELSSLRSEDTAVYYCARNTDCYGDFLGLDVWGQGTTVTVSSGGGGSGGGGSGGGGSDIVMTQSPDSLAVSLGERATINCRASSSISNYLAWYQQKPGQPPKLLIYGASTRASGVPDRFSGSGSGTDFTLTISSLQAEDVAVYYCQQSYSTPLTFGQGTKVEIK

SEQ ID NO: 265 - protein, 244 aa, synthetic construct
  REGION 1..244: note = NK77.40_CD70_DB03_A11 scFv
QVQLVQSGAEVKKPGASVKVSCKASGYTFNGYLMHWVRQAPGQGLEWMGIVNPSDGSTGYAQKFQGRVTMTRDTSTSTVYMELSSLRSEDTAVYYCAKDTGLRYFDWLLDYWGQGTLVTVSSGGGGSGGGGSGGGGSDIQMTQSPSSLSASVGDRVTITCRASQGITNFLAWYQQKPGKAPKLLIYDASNLETGVPSRFSGSGSGTDFTLTISSLQPEDFATYYCQQSYGAPLTFGQGTRLEIK

SEQ ID NO: 266 - protein, 240 aa, synthetic construct
  REGION 1..240: note = NK77.41_CD70_DB03_A12 scFv
QVQLVQSGAEVKKPGASVKVSCKASGYTFTSYYMHWVRQAPGQGLEWMGIIDPSGGRTIYAQRFQGRVTMTRDTSTSTVYMELSSLRSEDTAVYYCARHEAGGIFDYWGQGTLVTVSSGGGGSGGGGSGGGGSDIQMTQSPSSLSASVGDRVTITCQASQDISNYLNWYQQKPGKAPKLLIYSASTLQSGVPSRFSGSGSGTDFTLTISSLQPEDFATYYCQQSYSSPYRFGQGTKVEIK

SEQ ID NO: 267 - protein, 248 aa, synthetic construct
  REGION 1..248: note = NK77.42_CD70_DB03_B01 scFv
QVQLVQSGAEVKKPGSSVKVSCKASGYTFSDSYMHWVRQAPGQGLEWVGGIIPMAGIPAYAEEFQGRVTITADESTSTAYMELSSLRSEDTAVYYCARADDYGGNWYFDLWGRGTLVTVSSGGGGSGGGGSGGGGSDIVMTQSPLSLPVTPGEPASISCRSSQSLLHSNGYNYLDWYLQKPGQSPQLLIYAASSLQSGVPDRFSGSGSGTDFTLKISRVEAEDVGVYYCMQGAHWPPTFGQGTKLEIK

SEQ ID NO: 268 - protein, 242 aa, synthetic construct
  REGION 1..242: note = NK77.43_CD70_DB03_B04 scFv
QVQLVQSGAEVKKPGASVKVSCKASGYIFTDYYMHWVRQAPGQGLEWMGIINPSGGSTSYAQKFQGRVTMTRDTSTSTVYMELSSLRSEDTAVYYCARDSGWYESWFDPWGQGTLVTVSSGGGGSGGGGSGGGGSDIQMTQSPSSLSASVGDRVTITCRASQDIRDGLGWYQQKPGKAPKLLIYAASTLQSGVPSRFSGSGSGTDFTLTISSLQPEDFATYYCQQSYGTPPTFGQGTKVEIK

SEQ ID NO: 269 - protein, 243 aa, synthetic construct
  REGION 1..243: note = NK77.44_CD70_DB03_B06 scFv
QVQLVQSGAEVKKPGASVKVSCKASGYTFTDYYLHWVRQAPGQGLEWMGWISAYNGNTNYAQKFQGRVTMTRDTSTSTVYMELSSLRSEDTAVYYCAREIVGATEDWYFDLWGRGTLVTVSSGGGGSGGGGSGGGGSEIVMTQSPATLSVSPGERATLSCRASQSVSSYLAWYQQKPGQAPRLLIYGASTRATGIPARFSGSGSGTEFTLTISSLQSEDFAVYYCQQYDSSPTFGQGTKVEIK

SEQ ID NO: 270 - protein, 241 aa, synthetic construct
  REGION 1..241: note = NK77.45_CD70_DB03_B09 scFv
QVQLVQSGAEVKKPGASVKVSCKASGYTFTAYYLHWVRQAPGQGLEWMGMINPNNGGTIYAQTFQGRVTMTRDTSTSTVYMELSSLRSEDTAVYYCARDLGGYVLFDYWGQGTLVTVSSGGGGSGGGGSGGGGSDIQMTQSPSSLSASVGDRVTITCRASQSISSYLNWYQQKPGKAPKLLIYDASNLETGVPSRFSGSGSGTDFTLTISSLQPEDFATYYCQQSHSAPITFGQGTRLEIK

SEQ ID NO: 271 - protein, 241 aa, synthetic construct
  REGION 1..241: note = NK77.46_CD70_DB03_C05 scFv
QVQLVQSGAEVKKPGASVKVSCKASGYTFTDYYIHWVRQAPGQGLEWMGMINPRGGSTTYAQSFQGRVTMTRDTSTSTVYMELSSLRSEDTAVYYCARDLGDYGDYDYWGQGTLVTVSSGGGGSGGGGSGGGGSDIQMTQSPSSLSASVGDRVTITCRASQSISTNLAWYQQKPGKAPKLLIYDASYLEAGVPSRFSGSGSGTDFTLTISSLQPEDFATYYCQQSYSTPPTFGQGTKLEIK

SEQ ID NO: 272 - protein, 252 aa, synthetic construct
  REGION 1..252: note = NK77.47_CD70_DB03_D11 scFv
EVQLLESGGGLVQPGGSLRLSCAASGFTFSNSDMNWVRQAPGKGLEWVSAISGGGDTLYYADSVKGRFTISRDNSKNTLYLQMNSLRAEDTAVYYCAMASALDSSGDNEAFDIWGQGTTVTVSSGGGGSGGGGSGGGGSDIVMTQSPDSLAVSLGERATINCKSSQSVLYSSNNKNYLAWYQQKPGQPPKLLIYWASTRDSGVPDRFSGSGSGTDFTLTISSLQAEDVAVYYCQQYYGFPPTFGQGTRLEIK

SEQ ID NO: 273 - protein, 244 aa, synthetic construct
  REGION 1..244: note = NK77.48_CD70_DB03_E01 scFv
QVQLVQSGAEVKKPGASVKVSCKASGYTFTSYYMHWVRQAPGQGLEWMGWINPNNGGTSYAQKFQGRVTMTRDTSTSTVYMELSSLRSEDTAVYYCARVEDDFWSGPSFDYWGQGTLVTVSSGGGGSGGGGSGGGGSDIQMTQSPSSLSASVGDRVTITCQASHDISKFLNWYQQKPGKAPKLLIYDASNLQRGVPSRFSGSGSGTDFTLTISSLQPEDFATYYCQQTYSFPFTFGQGTKLEIK

SEQ ID NO: 274 - protein, 246 aa, synthetic construct
  REGION 1..246: note = NK77.49_CD70_DB03_E03 scFv
QVQLVQSGAEVKKPGSSVKVSCKASGGTFTNYAFSWVRQAPGQGLEWMGGIIPISGAANYAQKFQGRVTITADESTSTAYMELSSLRSEDTAVYYCARGSGLDDAFDIWGQGTMVTVSSGGGGSGGGGSGGGGSDIVMTQSPLSLPVTPGEPASISCRSSQSLLHSNGYNYLDWYLQKPGQSPQLLIYDASSLQSGVPDRFSGSGSGTDFTLKISRVEAEDVGVYYCMQARQTPLTFGQGTRLEIK

SEQ ID NO: 275 - protein, 256 aa, synthetic construct
  REGION 1..256: note = NK77.50_CD70_DB03_E09 scFv
QVQLVQSGAEVKKPGASVKVSCKASGYTFTAYYMHWVRQAPGQGLEWMGWMNPNSGNTGYAQKFQGRVTMTRDTSTSTVYMELSSLRSEDTAVYYCAREGRIDYGDYDDYYYYYGMDVWGQGTTVTVSSGGGGSGGGGSGGGGSDIVMTQSPLSLPVTPGEPASISCRSSQSLLHSNGYNYLDWYLQKPGQSPQLLIYAASNLQGGVPDRFSGSGSGTDFTLKISRVEAEDVGVYYCMQTLESPVTFGGGTKVEIK

SEQ ID NO: 276 - protein, 242 aa, synthetic construct
  REGION 1..242: note = NK77.51_CD70_DB03_F02 scFv
QVQLVQSGAEVKKPGASVKVSCKASGYTFTDYYVHWVRQAPGQGLEWMGTINPSGGSTSYAQKFQGRVTMTRDTSTSTVYMELSSLRSEDTAVYYCARDQGLWFTGFDYWGQGTLVTVSSGGGGSGGGGSGGGGSDIQMTQSPSSLSASVGDRVTITCRASQGISNNLNWYQQKPGKAPKLLIYDASNLERGVPSRFSGSGSGTDFTLTISSLQPEDFATYYCQQSYDGPITFGQGTRLEIK

SEQ ID NO: 277 - protein, 242 aa, synthetic construct
  REGION 1..242: note = NK77.52_CD70_DB03_F05 scFv
QVQLVQSGAEVKKPGASVKVSCKASGYTFTAYHMHWVRQAPGQGLEWMGIINPGDGATGYAQNLQGRVTMTRDTSTSTVYMELSSLRSEDTAVYYCAGEGISGSDAFDIWGQGTLVTVSSGGGGSGGGGSGGGGSDIQMTQSPSSLSASVGDRVTITCRASQSISSWLAWYQQKPGKAPKLLIYAASSLQSGVPSRFSGSGSGTDFTLTISSLQPEDFATYYCLQDYSYPLTFGGGTKVEIK

SEQ ID NO: 278 - protein, 240 aa, synthetic construct
  REGION 1..240: note = NK77.53_CD70_DB03_F06 scFv
QVQLVQSGAEVKKPGSSVKVSCKASGGTFSSYAISWVRQAPGQGLEWMGWMNPNSGNTGYAQKFQGRVTITADESTSTAYMELSSLRSEDTAVYYCAWGVDPYYFDYWGQGTLVTVSSGGGGSGGGGSGGGGSDIQMTQSPSSLSASVGDRVTITCRASQSINRWLAWYQQKPGKAPKLLIYDASNLETGVPSRFSGSGSGTDFTLTISSLQPEDFATYYCQQSYITPLTFGGGTKVEIK

SEQ ID NO: 279 - protein, 240 aa, synthetic construct
  REGION 1..240: note = NK77.54_CD70_DB03_F09 scFv
QVQLVQSGAEVKKPGASVKVSCKASGYTFTSYYMHWVRQAPGQGLEWMGIFNPSDGSTSYAQKFQGRVTMTRDTSTSTVYMELSSLRSEDTAVYYCARDVGETTFDPWGQGTLVTVSSGGGGSGGGGSGGGGSDIQMTQSPSSLSASVGDRVTITCQASQDISNYLNWYQQKPGKAPKLLIYDASSLESGVPSRFSGSGSGTDFTLTISSLQPEDFATYYCQQTNSFPITFGQGTRLEIK

SEQ ID NO: 280 - protein, 245 aa, synthetic construct
  REGION 1..245: note = NK77.55_CD70_DB03_F12 scFv
QVQLVQSGAEVKKPGASVKVSCKASGYTFTSYGISWVRQAPGQGLEWMGWISAYNGHTNYAQKFQGRVTMTRDTSTSTVYMELSSLRSEDTAVYYCARDSVRGWDYYYGMGVWGQGTTVTVSSGGGGSGGGGSGGGGSDIQMTQSPSSLSASVGDRVTITCQASQDIRNFLNWYQQKPGKAPKLLIYAASTLQSGVPSRFSGSGSGTDFTLTISSLQPEDFATYYCQQSYSAPSTFGQGTKLEIK

SEQ ID NO: 281 - protein, 242 aa, synthetic construct
  REGION 1..242: note = NK77.56_CD70_DB03_G06 scFv
QVQLVQSGAEVKKPGSSVKVSCKASGYTFIDYYMHWVRQAPGQGLEWMGWMNPHSGNSDNAPKFQGRVTITADESTSTAYMELSSLRSEDTAVYYCARGYSGYDLTADYWGQGTLVTVSSGGGGSGGGGSGGGGSDIQMTQSPSSLSASVGDRVTITCRASQSISNYLNWYQQKPGKAPKLLIYDASNLETGVPSRFSGSGSGTDFTLTISSLQPEDFATYYCQQSYSTPITFGQGTRLEIK

SEQ ID NO: 282 - protein, 251 aa, synthetic construct
  REGION 1..251: note = NK77.57_CD70_DB03_G11 scFv
QVQLVQSGAEVKKPGASVKVSCKASGYTFTGQYMHWVRQAPGQGLEWMGWINPNTGDTNYAQKFQGRVTMTRDTSTSTVYMELSSLRSEDTAVYYCARDSVFEVEGGTDYYYYYGMDVWGQGTMVTVSSGGGGSGGGGSGGGGSDIQMTQSPSSLSASVGDRVTITCRASETISGWLAWYQQKPGKAPKLLIYDASNLETGVPSRFSGSGSGTDFTLTISSLQPEDFATYYCQQSYSTPWTFGQGTKLEIK

SEQ ID NO: 283 - protein, 241 aa, synthetic construct
  REGION 1..241: note = NK77.58_CD70_DB03_H08 scFv
QVQLVQSGAEVKKPGASVKVSCKASGYTFTSYDINWVRQAPGQGLEWMGVINPSGGGTSYAQKFQGRVTMTRDTSTSTVYMELSSLRSEDTAVYYCARYSGYDWVFDYWGQGTLVTVSSGGGGSGGGGSGGGGSDIQMTQSPSSLSASVGDRVTITCRASQGIGSWLAWYQQKPGKAPKLLIYAASTLQSGVPSRFSGSGSGTDFTLTISSLQPEDFATYYCQQSYSTPWTFGPGTKVDIK

SEQ ID NO: 284 - protein, 242 aa, synthetic construct
  REGION 1..242: note = NK77.59_CD70_DB03_H10 scFv
QVQLVQSGAEVKKPGASVKVSCKASGYTFANYYMHWVRQAPGQGLEWMGIINPSGGSTSYAQKFQGRVTMTRDTSTSTVYMELSSLRSEDTAVYYCARDSGSYFGWFDPWGQGTLVTVSSGGGGSGGGGSGGGGSDIQMTQSPSSLSASVGDRVTITCRASQSISSSLAWYQQKPGKAPKLLIYDASSLQSGVPSRFSGSGSGTDFTLTISSLQPEDFATYYCQQSYNTPPTFGGGTKLEIK

SEQ ID NO: 285 - protein, 242 aa, synthetic construct
  REGION 1..242: note = NK77.60_CD70_DB04_A05 scFv
QVQLVQSGAEVKKPGASVKVSCKASGYTFTTYYMHWVRQAPGQGLEWMGIINPTGGSTYYAQKFQGRVTMTRDTSTSTVYMELSSLRSEDTAVYYCARDSGNYQGIFDYWGQGTLVTVSSGGGGSGGGGSGGGGSDIQMTQSPSSLSASVGDRVTITCRASQGIGGYLAWYQQKPGKAPKLLIYDASNLETGVPSRFSGSGSGTDFTLTISSLQPEDFATYYCQQSYDSPPTFGQGTRLEIK

SEQ ID NO: 286 - protein, 241 aa, synthetic construct
  REGION 1..241: note = NK77.61_CD70_DB04_A07 scFv
QVQLVQSGAEVKKPGASVKVSCKASGNTFTSYYMHWVRQAPGQGLEWMGWINPNSGDTNYAQNFQGRVTMTRDTSTSTVYMELSSLRSEDTAVYYCARGVSGYDLFDYWGQGTLVTVSSGGGGSGGGGSGGGGSDIQMTQSPSSLSASVGDRVTITCRASQSVSSYLNWYQQKPGKAPKLLIYDTSNLETGVPSRFSGSGSGTDFTLTISSLQPEDFATYYCQQAHSFPLTFGGGTKVEIK

SEQ ID NO: 287 - protein, 241 aa, synthetic construct
  REGION 1..241: note = NK77.62_CD70_DB04_A10 scFv
EVQLVESGGGLVKPGGSLRLSCAASGFTFSSYGMHWVRQAPGKGLEWVASIKHDGSEQYYVDSVKGRFTISRDDSKNTLYLQMNSLKTEDTAVYYCAASGVDVWGQGTTVTVSSGGGGSGGGGSGGGGSDIVMTQSPLSLPVTPGEPASISCRSSQSLLHSNGYNYLDWYLQKPGQSPQLLIYLGSTRASGVPDRFSGSGSGTDFTLKISRVEAEDVGVYYCMQALDTPLTFGGGTKLEIK

SEQ ID NO: 288 - protein, 244 aa, synthetic construct
  REGION 1..244: note = NK77.63_CD70_DB04_A11 scFv
QVQLVQSGAEVKKPGASVKVSCKASGGTFSRYDINWVRQAPGQGLEWVGIIDPTGASTSYAQKFQGRVTMTRDTSTSTVYMELSSLRSEDTAVYYCARDYSYGMDYYGMDVWGQGTLVTVSSGGGGSGGGGSGGGGSDIQMTQSPSSLSASVGDRVTITCQASQDISNYLNWYQQKPGKAPKLLIYDTSNLQTGVPSRFSGSGSGTDFTLTISSLQPEDFATYYLSTDLQTTAHFGQGTKVEIK

SEQ ID NO: 289 - protein, 246 aa, synthetic construct
  REGION 1..246: note = NK77.64_CD70_DB04_B03 scFv
QVQLVQSGAEVKKPGSSVKVSCKASGYTFTSYGISWVRQAPGQGLEWMGGIIPIFGTTNYAQKFQGRVTITADESTSTAYMELSSLRSEDTAVYYCARDHSGDGYFDLWGRGTLVTVSSGGGGSGGGGSGGGGSDIVMTQSPLSLPVTPGEPASISCRSSQSLLHSNGYNYLDWYLQKPGQSPQLLIYDASSLQSGVPDRFSGSGSGTDFTLKISRVEAEDVGVYYCMQGTHWPPTFGQGTKVEIK

SEQ ID NO: 290 - protein, 240 aa, synthetic construct
  REGION 1..240: note = NK77.65_CD70_DB04_B05 scFv
QVQLVQSGAEVKKPGASVKVSCKASGYTFTENEMHWVRQAPGQGLEWMGWINPNSGGTNYAQKFQGRVTMTRDTSTSTVYMELSSLRSEDTAVYYCAGSWGGYYFDYWGQGTLVTVSSGGGGSGGGGSGGGGSDIQMTQSPSSLSASVGDRVTITCRASQSVSRYLNWYQQKPGKAPKLLIYDASNLETGVPSRFSGSGSGTDFTLTISSLQPEDFATYYCQQADSFPVTFGQGTKLEIK

SEQ ID NO: 291 - protein, 243 aa, synthetic construct
  REGION 1..243: note = NK77.66_CD70_DB04_B07 scFv
QVQLVQSGAEVKKPGASVKVSCKASGYTFTNYYIYWVRQAPGQGLEWMGWINPNDGATNYAQKFQGRVTMTRDTSTSTVYMELSSLRSEDTAVYYCAREGNDYYYYFMDYWGQGTLVTVSSGGGGSGGGGSGGGGSDIQMTQSPSSLSASVGDRVTITCRASQGISNNLNWYQQKPGKAPKLLIYHASNLETGVPSRFSGSGSGTDFTLTISSLQPEDFATYYCQQSYDGPMTFGQGTKLEIK

SEQ ID NO: 292 - protein, 249 aa, synthetic construct
  REGION 1..249: note = NK77.67_CD70_DB04_C01 scFv
QVQLVQSGAEVKKPGSSVKVSCKASGGTFSSYAISWVRQAPGQGLEWMGGITPMFGTTDYAQKFQGRVTITADESTSTAYMELSSLRSEDTAVYYCARDERDGYATVAFDIWGQGTMVTVSSGGGGSGGGGSGGGGSDIVMTQSPLSLPVTPGEPASISCRSSQSLLHSNGYNYLDWYLQKPGQSPQLLIYDASNLETGVPDRFSGSGSGTDFTLKISRVEAEDVGVYYCMQGTHWPPTFGQGTKVEIK

SEQ ID NO: 293 - protein, 244 aa, synthetic construct
  REGION 1..244: note = NK77.68_CD70_DB04_C04 scFv
QVQLVQSGAEVKKPGASVKVSCKASGYTFTSYYMHWVRQAPGQGLEWMGIINPSDGGTSYADKFQGRVTMTRDTSTSTVYMELSSLRSEDTAVYYCARALAPLGWGDGMDVWGQGTTVTVSSGGGGSGGGGSGGGGSDIQMTQSPSSLSASVGDRVTITCQASQDISNYLNWYQQKPGKAPKLLIYDASNLETGVPSRFSGSGSGTDFTLTISSLQPEDFATYYCQQSYDGPITFGQGTRLEIK

SEQ ID NO: 294 - protein, 241 aa, synthetic construct
  REGION 1..241: note = NK77.69_CD70_DB04_C06 scFv
QVQLVQSGAEVKKPGSSVKVSCKASGYTFTSYYIHWVRQAPGQGLEWMGWMNPSSGVTNFAQKFQGRVTITADESTSTAYMELSSLRSEDTAVYYCARGSDQGDWSDPWGQGTLVTVSSGGGGSGGGGSGGGGSDIQMTQSPSSLSASVGDRVTITCRASQSISSYLNWYQQKPGKAPKLLIYDASNLETGVPSRFSGSGSGTDFTLTISSLQPEDFATYYCQQSYNTPPTFGGGTKVEIK

SEQ ID NO: 295 - protein, 244 aa, synthetic construct
  REGION 1..244: note = NK77.70_CD70_DB04_C07 scFv
QVQLVQSGAEVKKPGASVKVSCKASGYTFTDSYIHWVRQAPGQGLEWIGWMNPNTGDTGYAQKFQGRVTMTRDTSTSTVYMELSSLRSEDTAVYYCAKDDFGELAPATFDPWGQGTLVTVSSGGGGSGGGGSGGGGSDIQMTQSPSSLSASVGDRVTITCQASQDISNYLNWYQQKPGKAPKLLIYGASSLQSGVPSRFSGSGSGTDFTLTISSLQPEDFATYYCLQDAATPITFGQGTRLEIK

SEQ ID NO: 296 - protein, 244 aa, synthetic construct
  REGION 1..244: note = NK77.71_CD70_DB04_D02 scFv
QVQLVQSGAEVKKPGASVKVSCKASGYTFTSYDINWVRQAPGQGLEWMGVISPSGGGTSYAQKFQGRVTMTRDTSTSTVYMELSSLRSEDTAVYYCARYYGGNPEGWYFDLWGRGTLVTVSSGGGGSGGGGSGGGGSDIQMTQSPSSLSASVGDRVTITCRASQSIGNWLAWYQQKPGKAPKLLIYDASDLETGVPSRFSGSGSGTDFTLTISSLQPEDFATYYCQQSYTTPWTFGQGTKVEIK

SEQ ID NO: 297 - protein, 259 aa, synthetic construct
  REGION 1..259: note = NK77.72_CD70_DB04_D05 scFv
EVQLLESGGGLVQPGGSLRLSCAASGFVFDDYAIHWVRQAPGKGLEWVAAISYDGSNKYYADSVKGRFTISRDNSKNTLYLQMNSLRAEDTAVYYCARAPQYYGSGTDPLEVRYYYYGMDVWGQGTTVTVSSGGGGSGGGGSGGGGSDIVMTQSPLSLPVTPGEPASISCRSSQSLLHSNGYNYLDWYLQKPGQSPQLLIYEVSNRASGVPDRFSGSGSGTDFTLKISRVEAEDVGVYYCMKGLQTPLTFGPGTKVDIK

SEQ ID NO: 298 - protein, 244 aa, synthetic construct
  REGION 1..244: note = NK77.73_CD70_DB04_D07 scFv
QVQLVQSGAEVKKPGSSVKVSCKASGGTFRNYAISWVRQAPGQGLEWMGGIIPIFGTANYAQKFQGRVTITADESTSTAYMELSSLRSEDTAVYYCARDHSAGTHHDAFDIWGQGTMVTVSSGGGGSGGGGSGGGGSDIQMTQSPSSLSASVGDRVTITCRASQGISNYLAWYQQKPGKAPKLLIYAASSLQSGVPSRFSGSGSGTDFTLTISSLQPEDFATYYCQQSHSTPLTFGQGTKVEIK

SEQ ID NO: 299 - protein, 239 aa, synthetic construct
  REGION 1..239: note = NK77.74_CD70_DB04_D08 scFv
QVQLVQSGAEVKKPGASVKVSCKASGYTFTSYYIHWVRQAPGQGLEWMGWMNPNSGNAGYAQKFQGRVTMTRDTSTSTVYMELSSLRSEDTAVYYCAREYWGSFDYWGQGTLVTVSSGGGGSGGGGSGGGGSDIQMTQSPSSLSASVGDRVTITCRASQGISNNLNWYQQKPGKAPKLLIYDASNLETGVPSRFSGSGSGTDFTLTISSLQPEDFATYYCQQSYSTPYTFGQGTKVEIK

SEQ ID NO: 300 - protein, 240 aa, synthetic construct
  REGION 1..240: note = NK77.75_CD70_DB04_D10 scFv
QVQLVQSGAEVKKPGASVKVSCKASGYTFTGYYMHWVRQAPGQGLEWMGMIDPSDGSTIYAQKFQGRVTMTRDTSTSTVYMELSSLRSEDTAVYYCARERPLYASDLWGQGTLVTVSSGGGGSGGGGSGGGGSDIQMTQSPSSLSASVGDRVTITCRASQDIGNDLGWYQQKPGKAPKLLIYAASSLQSGVPSRFSGSGSGTDFTLTISSLQPEDFATYYCLQDYDYPLTFGQGTKVEIK

SEQ ID NO: 301 - protein, 241 aa, synthetic construct
  REGION 1..241: note = NK77.85_CD70_DB03_B02 scFv
QVQLVQSGAEVKKPGSSVKVSCKASGYTFTNYYMHWVRQAPGQGLEWMGWMNPDSGNTGYAQKFQGRVTITADESTSTAYMELSSLRSEDTAVYYCARSSSSWPDFDLWGRGTLVTVSSGGGGSGGGGSGGGGSDIQMTQSPSSLSASVGDRVTITCRASQSISSYLNWYQQKPGKAPKLLIYDASNLETGVPSRFSGSGSGTDFTLTISSLQPEDFATYYCQQSYNTPYSFGQGTKVEIK

SEQ ID NO: 302 - protein, 242 aa, synthetic construct
  REGION 1..242: note = NK77.86_CD70_DB04_A06 scFv
QVQLVQSGAEVKKPGASVKVSCKASGYTFTSYSMHWVRQAPGQGLEWVGIINPSSGSASYAQKFQGRVTMTRDTSTSTVYMELSSLRSEDTAVYYCARERGAYSSTFDYWGQGTLVTVSSGGGGSGGGGSGGGGSDIQMTQSPSSLSASVGDRVTITCRTSQSISSYLNWYQQKPGKAPKLLIYDASNLETGVPSRFSGSGSGTDFTLTISSLQPEDFATYYCLQDYSYPLTFGQGTKVEIK

SEQ ID NO: 303 - protein, 242 aa, synthetic construct
  REGION 1..242: note = NK77.87_CD70_DB04_A09 scFv
QVQLVQSGAEVKKPGASVKVSCKASGYTFTDYYMHWVRQAPGQGLEWMGVINPSDGTAHYAQRLQGRVTMTRDTSTSTVYMELSSLRSEDTAVYYCARDSGSYYADFDYWGQGTLVTVSSGGGGSGGGGSGGGGSDIQMTQSPSSLSASVGDRVTITCQASQDISNYLNWYQQKPGKAPKLLIYDASSLQSGVPSRFSGSGSGTDFTLTISSLQPEDFATYYCQQSYSTPPAFGQGTKVEIK

SEQ ID NO: 304 - protein, 507 aa, synthetic construct
  REGION 1..507: note = NK77.76_38-38 scFv
QVQLVQSGAEVKKPGASVKVSCKASGYSFTSYYMHWVRQAPGQGLEWMGIINPSGGTTSYAQKFQGRVTMTRDTSTSTVYMELSSLRSEDTAVYYCARDNSPYSSSWWDYFDYWGQGTLVTVSSGGGGSGGGGSGGGGSDIQMTQSPSSLSASVGDRVTITCRASQDIRHYLAWYQQKPGKAPKLLIYDASSLQSGVPSRFSGSGSGTDFTLTISSLQPEDFATYYCQQTYDAPITFGQGTRLEIKGGGGSGGGGSGGGGSQVQLVQSGAEVKKPGASVKVSCKASGYSFTSYYMHWVRQAPGQGLEWMGIINPSGGTTSYAQKFQGRVTMTRDTSTSTVYMELSSLRSEDTAVYYCARDNSPYSSSWWDYFDYWGQGTLVTVSSGGGGSGGGGSGGGGSDIQMTQSPSSLSASVGDRVTITCRASQDIRHYLAWYQQKPGKAPKLLIYDASSLQSGVPSRFSGSGSGTDFTLTISSLQPEDFATYYCQQTYDAPITFGQGTRLEIK

SEQ ID NO: 305 - protein, 507 aa, synthetic construct
  REGION 1..507: note = NK77.77_64-64 scFv
QVQLVQSGAEVKKPGSSVKVSCKASGYTFTSYGISWVRQAPGQGLEWMGGIIPIFGTTNYAQKFQGRVTITADESTSTAYMELSSLRSEDTAVYYCARDHSGDGYFDLWGRGTLVTVSSGGGGSGGGGSGGGGSDIVMTQSPLSLPVTPGEPASISCRSSQSLLHSNGYNYLDWYLQKPGQSPQLLIYDASSLQSGVPDRFSGSGSGTDFTLKISRVEAEDVGVYYCMQGTHWPPTFGQGTKVEIKGGGGSGGGGSGGGGSQVQLVQSGAEVKKPGSSVKVSCKASGYTFTSYGISWVRQAPGQGLEWMGGIIPIFGTTNYAQKFQGRVTITADESTSTAYMELSSLRSEDTAVYYCARDHSGDGYFDLWGRGTLVTVSSGGGGSGGGGSGGGGSDIVMTQSPLSLPVTPGEPASISCRSSQSLLHSNGYNYLDWYLQKPGQSPQLLIYDASSLQSGVPDRFSGSGSGTDFTLKISRVEAEDVGVYYCMQGTHWPPTFGQGTKVEIK

SEQ ID NO: 306 - protein, 495 aa, synthetic construct
  REGION 1..495: note = NK77.78_65-65 scFv
QVQLVQSGAEVKKPGASVKVSCKASGYTFTENEMHWVRQAPGQGLEWMGWINPNSGGTNYAQKFQGRVTMTRDTSTSTVYMELSSLRSEDTAVYYCAGSWGGYYFDYWGQGTLVTVSSGGGGSGGGGSGGGGSDIQMTQSPSSLSASVGDRVTITCRASQSVSRYLNWYQQKPGKAPKLLIYDASNLETGVPSRFSGSGSGTDFTLTISSLQPEDFATYYCQQADSFPVTFGQGTKLEIKGGGGSGGGGSGGGGSQVQLVQSGAEVKKPGASVKVSCKASGYTFTENEMHWVRQAPGQGLEWMGWINPNSGGTNYAQKFQGRVTMTRDTSTSTVYMELSSLRSEDTAVYYCAGSWGGYYFDYWGQGTLVTVSSGGGGSGGGGSGGGGSDIQMTQSPSSLSASVGDRVTITCRASQSVSRYLNWYQQKPGKAPKLLIYDASNLETGVPSRFSGSGSGTDFTLTISSLQPEDFATYYCQQADSFPVTFGQGTKLEIK

SEQ ID NO: 307 - protein, 510 aa, synthetic construct
  REGION 1..510: note = NK77.79_38-67 scFv
QVQLVQSGAEVKKPGASVKVSCKASGYSFTSYYMHWVRQAPGQGLEWMGIINPSGGTTSYAQKFQGRVTMTRDTSTSTVYMELSSLRSEDTAVYYCARDNSPYSSSWWDYFDYWGQGTLVTVSSGGGGSGGGGSGGGGSDIQMTQSPSSLSASVGDRVTITCRASQDIRHYLAWYQQKPGKAPKLLIYDASSLQSGVPSRFSGSGSGTDFTLTISSLQPEDFATYYCQQTYDAPITFGQGTRLEIKGGGGSGGGGSGGGGSQVQLVQSGAEVKKPGSSVKVSCKASGGTFSSYAISWVRQAPGQGLEWMGGITPMFGTTDYAQKFQGRVTITADESTSTAYMELSSLRSEDTAVYYCARDERDGYATVAFDIWGQGTMVTVSSGGGGSGGGGSGGGGSDIVMTQSPLSLPVTPGEPASISCRSSQSLLHSNGYNYLDWYLQKPGQSPQLLIYDASNLETGVPDRFSGSGSGTDFTLKISRVEAEDVGVYYCMQGTHWPPTFGQGTKVEIK

SEQ ID NO: 308 - protein, 505 aa, synthetic construct
  REGION 1..505: note = NK77.80_38-68 scFv
QVQLVQSGAEVKKPGASVKVSCKASGYSFTSYYMHWVRQAPGQGLEWMGIINPSGGTTSYAQKFQGRVTMTRDTSTSTVYMELSSLRSEDTAVYYCARDNSPYSSSWWDYFDYWGQGTLVTVSSGGGGSGGGGSGGGGSDIQMTQSPSSLSASVGDRVTITCRASQDIRHYLAWYQQKPGKAPKLLIYDASSLQSGVPSRFSGSGSGTDFTLTISSLQPEDFATYYCQQTYDAPITFGQGTRLEIKGGGGSGGGGSGGGGSQVQLVQSGAEVKKPGASVKVSCKASGYTFTSYYMHWVRQAPGQGLEWMGIINPSDGGTSYADKFQGRVTMTRDTSTSTVYMELSSLRSEDTAVYYCARALAPLGWGDGMDVWGQGTTVTVSSGGGGSGGGGSGGGGSDIQMTQSPSSLSASVGDRVTITCQASQDISNYLNWYQQKPGKAPKLLIYDASNLETGVPSRFSGSGSGTDFTLTISSLQPEDFATYYCQQSYDGPITFGQGTRLEIK

SEQ ID NO: 309 - protein, 510 aa, synthetic construct
  REGION 1..510: note = NK77.81_64-67 scFv
QVQLVQSGAEVKKPGSSVKVSCKASGYTFTSYGISWVRQAPGQGLEWMGGIIPIFGTTNYAQKFQGRVTITADESTSTAYMELSSLRSEDTAVYYCARDHSGDGYFDLWGRGTLVTVSSGGGGSGGGGSGGGGSDIVMTQSPLSLPVTPGEPASISCRSSQSLLHSNGYNYLDWYLQKPGQSPQLLIYDASSLQSGVPDRFSGSGSGTDFTLKISRVEAEDVGVYYCMQGTHWPPTFGQGTKVEIKGGGGSGGGGSGGGGSQVQLVQSGAEVKKPGSSVKVSCKASGGTFSSYAISWVRQAPGQGLEWMGGITPMFGTTDYAQKFQGRVTITADESTSTAYMELSSLRSEDTAVYYCARDERDGYATVAFDIWGQGTMVTVSSGGGGSGGGGSGGGGSDIVMTQSPLSLPVTPGEPASISCRSSQSLLHSNGYNYLDWYLQKPGQSPQLLIYDASNLETGVPDRFSGSGSGTDFTLKISRVEAEDVGVYYCMQGTHWPPTFGQGTKVEIK

SEQ ID NO: 310 - protein, 505 aa, synthetic construct
  REGION 1..505: note = NK77.82_64-68 scFv
QVQLVQSGAEVKKPGSSVKVSCKASGYTFTSYGISWVRQAPGQGLEWMGGIIPIFGTTNYAQKFQGRVTITADESTSTAYMELSSLRSEDTAVYYCARDHSGDGYFDLWGRGTLVTVSSGGGGSGGGGSGGGGSDIVMTQSPLSLPVTPGEPASISCRSSQSLLHSNGYNYLDWYLQKPGQSPQLLIYDASSLQSGVPDRFSGSGSGTDFTLKISRVEAEDVGVYYCMQGTHWPPTFGQGTKVEIKGGGGSGGGGSGGGGSQVQLVQSGAEVKKPGASVKVSCKASGYTFTSYYMHWVRQAPGQGLEWMGIINPSDGGTSYADKFQGRVTMTRDTSTSTVYMELSSLRSEDTAVYYCARALAPLGWGDGMDVWGQGTTVTVSSGGGGSGGGGSGGGGSDIQMTQSPSSLSASVGDRVTITCQASQDISNYLNWYQQKPGKAPKLLIYDASNLETGVPSRFSGSGSGTDFTLTISSLQPEDFATYYCQQSYDGPITFGQGTRLEIK

SEQ ID NO: 311 - protein, 504 aa, synthetic construct
  REGION 1..504: note = NK77.83_65-67 scFv
QVQLVQSGAEVKKPGASVKVSCKASGYTFTENEMHWVRQAPGQGLEWMGWINPNSGGTNYAQKFQGRVTMTRDTSTSTVYMELSSLRSEDTAVYYCAGSWGGYYFDYWGQGTLVTVSSGGGGSGGGGSGGGGSDIQMTQSPSSLSASVGDRVTITCRASQSVSRYLNWYQQKPGKAPKLLIYDASNLETGVPSRFSGSGSGTDFTLTISSLQPEDFATYYCQQADSFPVTFGQGTKLEIKGGGGSGGGGSGGGGSQVQLVQSGAEVKKPGSSVKVSCKASGGTFSSYAISWVRQAPGQGLEWMGGITPMFGTTDYAQKFQGRVTITADESTSTAYMELSSLRSEDTAVYYCARDERDGYATVAFDIWGQGTMVTVSSGGGGSGGGGSGGGGSDIVMTQSPLSLPVTPGEPASISCRSSQSLLHSNGYNYLDWYLQKPGQSPQLLIYDASNLETGVPDRFSGSGSGTDFTLKISRVEAEDVGVYYCMQGTHWPPTFGQGTKVEIK

SEQ ID NO: 312 - protein, 499 aa, synthetic construct
  REGION 1..499: note = NK77.84_65-68 scFv
QVQLVQSGAEVKKPGASVKVSCKASGYTFTENEMHWVRQAPGQGLEWMGWINPNSGGTNYAQKFQGRVTMTRDTSTSTVYMELSSLRSEDTAVYYCAGSWGGYYFDYWGQGTLVTVSSGGGGSGGGGSGGGGSDIQMTQSPSSLSASVGDRVTITCRASQSVSRYLNWYQQKPGKAPKLLIYDASNLETGVPSRFSGSGSGTDFTLTISSLQPEDFATYYCQQADSFPVTFGQGTKLEIKGGGGSGGGGSGGGGSQVQLVQSGAEVKKPGASVKVSCKASGYTFTSYYMHWVRQAPGQGLEWMGIINPSDGGTSYADKFQGRVTMTRDTSTSTVYMELSSLRSEDTAVYYCARALAPLGWGDGMDVWGQGTTVTVSSGGGGSGGGGSGGGGSDIQMTQSPSSLSASVGDRVTITCQASQDISNYLNWYQQKPGKAPKLLIYDASNLETGVPSRFSGSGSGTDFTLTISSLQPEDFATYYCQQSYDGPITFGQGTRLEIK

SEQ ID NO: 313 - protein, 722 aa, synthetic construct
  REGION 1..722: note = NK77.1_CD70_DB01_C03 construct
MALPVTALLLPLALLLHAARPDYKDDDDKGGGGSGGGGSQVQLVQSGAEVKKPGASVKVSCKASGYTFTGHYLHWVRQAPGQGLEWMGWINPNSGGTNYAQKFQGRVTMTRDTSTSTVYMELSSLRSEDTAVYYCVRGSGWYDLDYWGQGTLVTVSSGGGGSGGGGSGGGGSDIQMTQSPSSLSASVGDRVTITCRASQNIGTYLAWYQQKPGKAPKLLIYDASNLETGVPSRFSGSGSGTDFTLTISSLQPEDFATYYCQQSYRIPLTFGQGTRLEIKTTTPAPRPPTPAPTIASQPLSLRPEACRPAAGGAVHTRGLDFACDIYIWAPLAGTCGVLLLSLVITLYCRRDQRLPPDAHKPPGGGSFRTPIQEEQADAHSTLAKIRVKFSRSADAPAYQQGQNQLYNELNLGRREEYDVLDKRRGRDPEMGGKPRRKNPQEGLYNELQKDKMAEAYSEIGMKGERRRGKGHDGLYQGLSTATKDTYDALHMQALPPRGSGEGRGSLLTCGDVEENPGPMALPVTALLLPLALLLHAARPNWVNVISDLKKIEDLIQSMHIDATLYTESDVHPSCKVTAMKCFLLELQVISLESGDASIHDTVENLIILANNSLSSNGNVTESGCKECEELEEKNIKEFLQSFVHIVQMFINTSTTTPAPRPPTPAPTIASQPLSLRPEACRPAAGGAVHTRGLDFACDIYIWAPLAGTCGVLLLSLVITLYC

SEQ ID NO: 314 - protein, 723 aa, synthetic construct
  REGION 1..723: note = NK77.2_CD70_DB01_D02 construct
MALPVTALLLPLALLLHAARPDYKDDDDKGGGGSGGGGSQVQLVQSGAEVKKPGASVKVSCKASGYTFTNYYMHWVRQAPGQGLEWMGIINPSGGSTSYAQKFQGRVTMTRDTSTSTVYMELSSLRSEDTAVYYCARELGVAGYFDLWGRGTLVTVSSGGGGSGGGGSGGGGSDIQMTQSPSSLSASVGDRVTITCRASQRISNWLAWYQQKPGKAPKLLIYDASNLETGVPSRFSGSGSGTDFTLTISSLQPEDFATYYCQQTYSPPPTFGQGTKLEIKTTTPAPRPPTPAPTIASQPLSLRPEACRPAAGGAVHTRGLDFACDIYIWAPLAGTCGVLLLSLVITLYCRRDQRLPPDAHKPPGGGSFRTPIQEEQADAHSTLAKIRVKFSRSADAPAYQQGQNQLYNELNLGRREEYDVLDKRRGRDPEMGGKPRRKNPQEGLYNELQKDKMAEAYSEIGMKGERRRGKGHDGLYQGLSTATKDTYDALHMQALPPRGSGEGRGSLLTCGDVEENPGPMALPVTALLLPLALLLHAARPNWVNVISDLKKIEDLIQSMHIDATLYTESDVHPSCKVTAMKCFLLELQVISLESGDASIHDTVENLIILANNSLSSNGNVTESGCKECEELEEKNIKEFLQSFVHIVQMFINTSTTTPAPRPPTPAPTIASQPLSLRPEACRPAAGGAVHTRGLDFACDIYIWAPLAGTCGVLLLSLVITLYC

SEQ ID NO: 315 - protein, 732 aa, synthetic construct
  REGION 1..732: note = NK77.3_CD70_DB01_E06 construct
MALPVTALLLPLALLLHAARPDYKDDDDKGGGGSGGGGSQVQLVQSGAEVKKPGASVKVSCKASGYTFTGYYIHWVRQAPGQGLEWMGIINPSGGSTSYAQKFQGRVTMTRDTSTSTVYMELSSLRSEDTAVYYCARDLSGIDGYIGFFDYWGQGTLVTVSSGGGGSGGGGSGGGGSDIVMTQSPLSLPVTPGEPASISCRSSQSLLHSNGYNYLDWYLQKPGQSPQLLIYAASSLQSGVPDRFSGSGSGTDFTLKISRVEAEDVGVYYCMQALQTPITFGQGTRLEIKTTTPAPRPPTPAPTIASQPLSLRPEACRPAAGGAVHTRGLDFACDIYIWAPLAGTCGVLLLSLVITLYCRRDQRLPPDAHKPPGGGSFRTPIQEEQADAHSTLAKIRVKFSRSADAPAYQQGQNQLYNELNLGRREEYDVLDKRRGRDPEMGGKPRRKNPQEGLYNELQKDKMAEAYSEIGMKGERRRGKGHDGLYQGLSTATKDTYDALHMQALPPRGSGEGRGSLLTCGDVEENPGPMALPVTALLLPLALLLHAARPNWVNVISDLKKIEDLIQSMHIDATLYTESDVHPSCKVTAMKCFLLELQVISLESGDASIHDTVENLIILANNSLSSNGNVTESGCKECEELEEKNIKEFLQSFVHIVQMFINTSTTTPAPRPPTPAPTIASQPLSLRPEACRPAAGGAVHTRGLDFACDIYIWAPLAGTCGVLLLSLVITLYC

SEQ ID NO: 316 - protein, 723 aa, synthetic construct
  REGION 1..723: note = NK77.4_CD70_DB01_G04 construct
MALPVTALLLPLALLLHAARPDYKDDDDKGGGGSGGGGSQVQLVQSGAEVKKPGASVKVSCKASGGTFRSHVISWVRQAPGQGLEWMGIIDPSGGSTSYAQRFQGRVTMTRDTSTSTVYMELSSLRSEDTAVYYCAKDYTGLLGMDVWGQGTTVTVSSGGGGSGGGGSGGGGSDIQMTQSPSSLSASVGDRVTITCRASQDIDTYLAWYQQKPGKAPKLLIYAASSLQSGVPSRFSGSGSGTDFTLTISSLQPEDFATYYCQQSYTTPFTFGQGTKVEIKTTTPAPRPPTPAPTIASQPLSLRPEACRPAAGGAVHTRGLDFACDIYIWAPLAGTCGVLLLSLVITLYCRRDQRLPPDAHKPPGGGSFRTPIQEEQADAHSTLAKIRVKFSRSADAPAYQQGQNQLYNELNLGRREEYDVLDKRRGRDPEMGGKPRRKNPQEGLYNELQKDKMAEAYSEIGMKGERRRGKGHDGLYQGLSTATKDTYDALHMQALPPRGSGEGRGSLLTCGDVEENPGPMALPVTALLLPLALLLHAARPNWVNVISDLKKIEDLIQSMHIDATLYTESDVHPSCKVTAMKCFLLELQVISLESGDASIHDTVENLIILANNSLSSNGNVTESGCKECEELEEKNIKEFLQSFVHIVQMFINTSTTTPAPRPPTPAPTIASQPLSLRPEACRPAAGGAVHTRGLDFACDIYIWAPLAGTCGVLLLSLVITLYC

SEQ ID NO: 317 - protein, 723 aa, synthetic construct
  REGION 1..723: note = NK77.5_CD70_DB01_G05 construct
MALPVTALLLPLALLLHAARPDYKDDDDKGGGGSGGGGSQVQLVQSGAEVKKPGASVKVSCKASGYTFIDYYIHWVRQAPGQGLEWMGWMNPNSGNTGYAQKFQGRVTMTRDTSTSTVYMELSSLRSEDTAVYYCARGLSGYDLDDYWGQGTLVTVSSGGGGSGGGGSGGGGSDIQMTQSPSSLSASVGDRVTITCQASQDISNYLNWYQQKPGKAPKLLIYDASSLESGVPSRFSGSGSGTDFTLTISSLQPEDFATYYCQQSYRSPLTFGGGTKVEIKTTTPAPRPPTPAPTIASQPLSLRPEACRPAAGGAVHTRGLDFACDIYIWAPLAGTCGVLLLSLVITLYCRRDQRLPPDAHKPPGGGSFRTPIQEEQADAHSTLAKIRVKFSRSADAPAYQQGQNQLYNELNLGRREEYDVLDKRRGRDPEMGGKPRRKNPQEGLYNELQKDKMAEAYSEIGMKGERRRGKGHDGLYQGLSTATKDTYDALHMQALPPRGSGEGRGSLLTCGDVEENPGPMALPVTALLLPLALLLHAARPNWVNVISDLKKIEDLIQSMHIDATLYTESDVHPSCKVTAMKCFLLELQVISLESGDASIHDTVENLIILANNSLSSNGNVTESGCKECEELEEKNIKEFLQSFVHIVQMFINTSTTTPAPRPPTPAPTIASQPLSLRPEACRPAAGGAVHTRGLDFACDIYIWAPLAGTCGVLLLSLVITLYC

SEQ ID NO: 318 - protein, 722 aa, synthetic construct
  REGION 1..722: note = NK77.6_CD70_DB01_G07 construct
MALPVTALLLPLALLLHAARPDYKDDDDKGGGGSGGGGSQVQLVQSGAEVKKPGASVKVSCKASGYTFTSYYMHWVRQAPGQGLEWMGWINPNSGGTKYAHKFQGRVTMTRDTSTSTVYMELSSLRSEDTAVYYCARGLSGYDFDYWGQGTTVTVSSGGGGSGGGGSGGGGSDIQMTQSPSSLSASVGDRVTITCQASQDISNYLNWYQQKPGKAPKLLIYDASNLETGVPSRFSGSGSGTDFTLTISSLQPEDFATYYCQQAYRWPITFGQGTRLEIKTTTPAPRPPTPAPTIASQPLSLRPEACRPAAGGAVHTRGLDFACDIYIWAPLAGTCGVLLLSLVITLYCRRDQRLPPDAHKPPGGGSFRTPIQEEQADAHSTLAKIRVKFSRSADAPAYQQGQNQLYNELNLGRREEYDVLDKRRGRDPEMGGKPRRKNPQEGLYNELQKDKMAEAYSEIGMKGERRRGKGHDGLYQGLSTATKDTYDALHMQALPPRGSGEGRGSLLTCGDVEENPGPMALPVTALLLPLALLLHAARPNWVNVISDLKKIEDLIQSMHIDATLYTESDVHPSCKVTAMKCFLLELQVISLESGDASIHDTVENLIILANNSLSSNGNVTESGCKECEELEEKNIKEFLQSFVHIVQMFINTSTTTPAPRPPTPAPTIASQPLSLRPEACRPAAGGAVHTRGLDFACDIYIWAPLAGTCGVLLLSLVITLYC

SEQ ID NO: 319 - protein, 723 aa, synthetic construct
  REGION 1..723: note = NK77.7_CD70_DB01_G11 construct
MALPVTALLLPLALLLHAARPDYKDDDDKGGGGSGGGGSQVQLVQSGAEVKKPGASVKVSCKASGYTFTGYYMHWVRQAPGQGLEWMGWMNPNSGNTGYAQKFQGRVTMTRDTSTSTVYMELSSLRSEDTAVYYCARGTDVYGDFDYWGQGTLVTVSSGGGGSGGGGSGGGGSDIQMTQSPSSLSASVGDRVTITCRASQSISSYLNWYQQKPGKAPKLLIYDASYLETGVPSRFSGSGSGTDFTLTISSLQPEDFATYYCQQSYTIPPTFGQGTKVEIKTTTPAPRPPTPAPTIASQPLSLRPEACRPAAGGAVHTRGLDFACDIYIWAPLAGTCGVLLLSLVITLYCRRDQRLPPDAHKPPGGGSFRTPIQEEQADAHSTLAKIRVKFSRSADAPAYQQGQNQLYNELNLGRREEYDVLDKRRGRDPEMGGKPRRKNPQEGLYNELQKDKMAEAYSEIGMKGERRRGKGHDGLYQGLSTATKDTYDALHMQALPPRGSGEGRGSLLTCGDVEENPGPMALPVTALLLPLALLLHAARPNWVNVISDLKKIEDLIQSMHIDATLYTESDVHPSCKVTAMKCFLLELQVISLESGDASIHDTVENLIILANNSLSSNGNVTESGCKECEELEEKNIKEFLQSFVHIVQMFINTSTTTPAPRPPTPAPTIASQPLSLRPEACRPAAGGAVHTRGLDFACDIYIWAPLAGTCGVLLLSLVITLYC

SEQ ID NO: 320 - protein, 730 aa, synthetic construct
  REGION 1..730: note = NK77.9_CD70_DB02_A03 construct
MALPVTALLLPLALLLHAARPDYKDDDDKGGGGSGGGGSQVQLVQSGAEVKKPGSSVKVSCKASGYTFTENEMHWVRQAPGQGLEWMGGIIPIFGTANYAQKFQGRVTITADESTSTAYMELSSLRSEDTAVYYCAREGGTAMATGYYYYGMDVWGQGTTVTVSSGGGGSGGGGSGGGGSDIQMTQSPSSLSASVGDRVTITCQASQDISNYLNWYQQKPGKAPKLLIYDASNLETGVPSRFSGSGSGTDFTLTISSLQPEDFATYYCQQSYSTPLTFGQGTKVEIKTTTPAPRPPTPAPTIASQPLSLRPEACRPAAGGAVHTRGLDFACDIYIWAPLAGTCGVLLLSLVITLYCRRDQRLPPDAHKPPGGGSFRTPIQEEQADAHSTLAKIRVKFSRSADAPAYQQGQNQLYNELNLGRREEYDVLDKRRGRDPEMGGKPRRKNPQEGLYNELQKDKMAEAYSEIGMKGERRRGKGHDGLYQGLSTATKDTYDALHMQALPPRGSGEGRGSLLTCGDVEENPGPMALPVTALLLPLALLLHAARPNWVNVISDLKKIEDLIQSMHIDATLYTESDVHPSCKVTAMKCFLLELQVISLESGDASIHDTVENLIILANNSLSSNGNVTESGCKECEELEEKNIKEFLQSFVHIVQMFINTSTTTPAPRPPTPAPTIASQPLSLRPEACRPAAGGAVHTRGLDFACDIYIWAPLAGTCGVLLLSLVITLYC

SEQ ID NO: 321 - protein, 728 aa, synthetic construct
  REGION 1..728: note = NK77.10_CD70_DB02_A04 construct
MALPVTALLLPLALLLHAARPDYKDDDDKGGGGSGGGGSQVQLVQSGAEVKKPGASVKVSCKASGYTFTENEMHWVRQAPGQGLEWMGWINSNGGYTGYALKFQGRVTMTRDTSTSTVYMELSSLRSEDTAVYYCARASNYGGHFDYWGQGTLVTVSSGGGGSGGGGSGGGGSDIVMTQSPLSLPVTPGEPASISCRSSQSLLHSNGYNYLDWYLQKPGQSPQLLIYQASSLESGVPDRFSGSGSGTDFTLKISRVEAEDVGVYYCMQGTHWPPTFGGGTKVEIKTTTPAPRPPTPAPTIASQPLSLRPEACRPAAGGAVHTRGLDFACDIYIWAPLAGTCGVLLLSLVITLYCRRDQRLPPDAHKPPGGGSFRTPIQEEQADAHSTLAKIRVKFSRSADAPAYQQGQNQLYNELNLGRREEYDVLDKRRGRDPEMGGKPRRKNPQEGLYNELQKDKMAEAYSEIGMKGERRRGKGHDGLYQGLSTATKDTYDALHMQALPPRGSGEGRGSLLTCGDVEENPGPMALPVTALLLPLALLLHAARPNWVNVISDLKKIEDLIQSMHIDATLYTESDVHPSCKVTAMKCFLLELQVISLESGDASIHDTVENLIILANNSLSSNGNVTESGCKECEELEEKNIKEFLQSFVHIVQMFINTSTTTPAPRPPTPAPTIASQPLSLRPEACRPAAGGAVHTRGLDFACDIYIWAPLAGTCGVLLLSLVITLYC

SEQ ID NO: 322 - protein, 723 aa, synthetic construct
  REGION 1..723: note = NK77.11_CD70_DB02_A05 construct
MALPVTALLLPLALLLHAARPDYKDDDDKGGGGSGGGGSQVQLVQSGAEVKKPGASVKVSCKASGYTFTSYYMHWVRQAPGQGLEWMGIINPSGGSTIYAQKFQGRVTMTRDTSTSTVYMELSSLRSEDTAVYYCAKDMGAWAAGFDYWGQGTLVTVSSGGGGSGGGGSGGGGSDIQMTQSPSSLSASVGDRVTITCQASQDISNYLNWYQQKPGKAPKLLIYATSTLANGVPSRFSGSGSGTDFTLTISSLQPEDFATYYCQQSYSTLTFGQGTRLEIKTTTPAPRPPTPAPTIASQPLSLRPEACRPAAGGAVHTRGLDFACDIYIWAPLAGTCGVLLLSLVITLYCRRDQRLPPDAHKPPGGGSFRTPIQEEQADAHSTLAKIRVKFSRSADAPAYQQGQNQLYNELNLGRREEYDVLDKRRGRDPEMGGKPRRKNPQEGLYNELQKDKMAEAYSEIGMKGERRRGKGHDGLYQGLSTATKDTYDALHMQALPPRGSGEGRGSLLTCGDVEENPGPMALPVTALLLPLALLLHAARPNWVNVISDLKKIEDLIQSMHIDATLYTESDVHPSCKVTAMKCFLLELQVISLESGDASIHDTVENLIILANNSLSSNGNVTESGCKECEELEEKNIKEFLQSFVHIVQMFINTSTTTPAPRPPTPAPTIASQPLSLRPEACRPAAGGAVHTRGLDFACDIYIWAPLAGTCGVLLLSLVITLYC

SEQ ID NO: 323 - protein, 724 aa, synthetic construct
  REGION 1..724: note = NK77.12_CD70_DB02_A06 construct
MALPVTALLLPLALLLHAARPDYKDDDDKGGGGSGGGGSQVQLVQSGAEVKKPGASVKVSCKASGYTFTGYYMHWVRQAPGQGLEWMGWINPNSGDTGYAQKFQGRVTMTRDTSTSTVYMELSSLRSEDTAVYYCARSVNDYGDYDGYWGQGTLVTVSSGGGGSGGGGSGGGGSDIQMTQSPSSLSASVGDRVTITCQASQDISNYLNWYQQKPGKAPKLLIYDASNLETGVPSRFSGSGSGTDFTLTISSLQPEDFATYYCQQSYSTPPTFGQGTKVEIKTTTPAPRPPTPAPTIASQPLSLRPEACRPAAGGAVHTRGLDFACDIYIWAPLAGTCGVLLLSLVITLYCRRDQRLPPDAHKPPGGGSFRTPIQEEQADAHSTLAKIRVKFSRSADAPAYQQGQNQLYNELNLGRREEYDVLDKRRGRDPEMGGKPRRKNPQEGLYNELQKDKMAEAYSEIGMKGERRRGKGHDGLYQGLSTATKDTYDALHMQALPPRGSGEGRGSLLTCGDVEENPGPMALPVTALLLPLALLLHAARPNWVNVISDLKKIEDLIQSMHIDATLYTESDVHPSCKVTAMKCFLLELQVISLESGDASIHDTVENLIILANNSLSSNGNVTESGCKECEELEEKNIKEFLQSFVHIVQMFINTSTTTPAPRPPTPAPTIASQPLSLRPEACRPAAGGAVHTRGLDFACDIYIWAPLAGTCGVLLLSLVITLYC

SEQ ID NO: 324 - protein, 724 aa, synthetic construct
  REGION 1..724: note = NK77.13_CD70_DB02_A07 construct
MALPVTALLLPLALLLHAARPDYKDDDDKGGGGSGGGGSQVQLVQSGAEVKKPGASVKVSCKASGYTFTGYYMHWVRQAPGQGLEWMGIINPSGGSTSYAQKFQGRVTMTRDTSTSTVYMELSSLRSEDTAVYYCARDYGDYDASFDYWGQGTLVTVSSGGGGSGGGGSGGGGSDIQMTQSPSSLSASVGDRVTITCRASQSIDNWLAWYQQKPGKAPKLLIYAASTLQSGVPSRFSGSGSGTDFTLTISSLQPEDFATYYCQQSYDSPPTFGQGTKLEIKTTTPAPRPPTPAPTIASQPLSLRPEACRPAAGGAVHTRGLDFACDIYIWAPLAGTCGVLLLSLVITLYCRRDQRLPPDAHKPPGGGSFRTPIQEEQADAHSTLAKIRVKFSRSADAPAYQQGQNQLYNELNLGRREEYDVLDKRRGRDPEMGGKPRRKNPQEGLYNELQKDKMAEAYSEIGMKGERRRGKGHDGLYQGLSTATKDTYDALHMQALPPRGSGEGRGSLLTCGDVEENPGPMALPVTALLLPLALLLHAARPNWVNVISDLKKIEDLIQSMHIDATLYTESDVHPSCKVTAMKCFLLELQVISLESGDASIHDTVENLIILANNSLSSNGNVTESGCKECEELEEKNIKEFLQSFVHIVQMFINTSTTTPAPRPPTPAPTIASQPLSLRPEACRPAAGGAVHTRGLDFACDIYIWAPLAGTCGVLLLSLVITLYC

SEQ ID NO: 325 - protein, 721 aa, synthetic construct
  REGION 1..721: note = NK77.14_CD70_DB02_A08 construct
MALPVTALLLPLALLLHAARPDYKDDDDKGGGGSGGGGSQVQLVQSGAEVKKPGASVKVSCKASGYTFTSYDINWVRQAPGQGLEWMGIINPSDGSTIYAQNFQGRVTMTRDTSTSTVYMELSSLRSEDTAVYYCVKEEAWYFDLWGRGTLVTVSSGGGGSGGGGSGGGGSDIQMTQSPSSLSASVGDRVTITCQASQDISNYLNWYQQKPGKAPKLLIYDASNLETGVPSRFSGSGSGTDFTLTISSLQPEDFATYYCQQSYSTPLTFGGGTKVEIKTTTPAPRPPTPAPTIASQPLSLRPEACRPAAGGAVHTRGLDFACDIYIWAPLAGTCGVLLLSLVITLYCRRDQRLPPDAHKPPGGGSFRTPIQEEQADAHSTLAKIRVKFSRSADAPAYQQGQNQLYNELNLGRREEYDVLDKRRGRDPEMGGKPRRKNPQEGLYNELQKDKMAEAYSEIGMKGERRRGKGHDGLYQGLSTATKDTYDALHMQALPPRGSGEGRGSLLTCGDVEENPGPMALPVTALLLPLALLLHAARPNWVNVISDLKKIEDLIQSMHIDATLYTESDVHPSCKVTAMKCFLLELQVISLESGDASIHDTVENLIILANNSLSSNGNVTESGCKECEELEEKNIKEFLQSFVHIVQMFINTSTTTPAPRPPTPAPTIASQPLSLRPEACRPAAGGAVHTRGLDFACDIYIWAPLAGTCGVLLLSLVITLYC

SEQ ID NO: 326 - protein, 721 aa, synthetic construct
  REGION 1..721: note = NK77.15_CD70_DB02_A09 construct
MALPVTALLLPLALLLHAARPDYKDDDDKGGGGSGGGGSQVQLVQSGAEVKKPGASVKVSCKASGYTFTSYYMHWVRQAPGQGLEWMGWMNPDNGDTGYAQMFQGRVTMTRDTSTSTVYMELSSLRSEDTAVYYCASGDYYDILYWGQGTLVTVSSGGGGSGGGGSGGGGSDIQMTQSPSSLSASVGDRVTITCQASQDISNYLNWYQQKPGKAPKLLIYDVSNLETGVPSRFSGSGSGTDFTLTISSLQPEDFATYYCQQANSFPLTFGGGTKVEIKTTTPAPRPPTPAPTIASQPLSLRPEACRPAAGGAVHTRGLDFACDIYIWAPLAGTCGVLLLSLVITLYCRRDQRLPPDAHKPPGGGSFRTPIQEEQADAHSTLAKIRVKFSRSADAPAYQQGQNQLYNELNLGRREEYDVLDKRRGRDPEMGGKPRRKNPQEGLYNELQKDKMAEAYSEIGMKGERRRGKGHDGLYQGLSTATKDTYDALHMQALPPRGSGEGRGSLLTCGDVEENPGPMALPVTALLLPLALLLHAARPNWVNVISDLKKIEDLIQSMHIDATLYTESDVHPSCKVTAMKCFLLELQVISLESGDASIHDTVENLIILANNSLSSNGNVTESGCKECEELEEKNIKEFLQSFVHIVQMFINTSTTTPAPRPPTPAPTIASQPLSLRPEACRPAAGGAVHTRGLDFACDIYIWAPLAGTCGVLLLSLVITLYC

SEQ ID NO: 327 - protein, 722 aa, synthetic construct
  REGION 1..722: note = NK77.16_CD70_DB02_A11 construct
MALPVTALLLPLALLLHAARPDYKDDDDKGGGGSGGGGSQVQLVQSGAEVKKPGASVKVSCKASGYTFTSYYMHWVRQAPGQGLEWMGWMNPNSGDTGYAQKFQGRVTMTRDTSTSTVYMELSSLRSEDTAVYYCARGPSGYEFDYWGQGTLVTVSSGGGGSGGGGSGGGGSDIQMTQSPSSLSASVGDRVTITCRASQTISNYLNWYQQKPGKAPKLLIYDASSLESGVPSRFSGSGSGTDFTLTISSLQPEDFATYYCQQAISFPLTFGGGTKVEIKTTTPAPRPPTPAPTIASQPLSLRPEACRPAAGGAVHTRGLDFACDIYIWAPLAGTCGVLLLSLVITLYCRRDQRLPPDAHKPPGGGSFRTPIQEEQADAHSTLAKIRVKFSRSADAPAYQQGQNQLYNELNLGRREEYDVLDKRRGRDPEMGGKPRRKNPQEGLYNELQKDKMAEAYSEIGMKGERRRGKGHDGLYQGLSTATKDTYDALHMQALPPRGSGEGRGSLLTCGDVEENPGPMALPVTALLLPLALLLHAARPNWVNVISDLKKIEDLIQSMHIDATLYTESDVHPSCKVTAMKCFLLELQVISLESGDASIHDTVENLIILANNSLSSNGNVTESGCKECEELEEKNIKEFLQSFVHIVQMFINTSTTTPAPRPPTPAPTIASQPLSLRPEACRPAAGGAVHTRGLDFACDIYIWAPLAGTCGVLLLSLVITLYC

SEQ ID NO: 328 - protein, 726 aa, synthetic construct
  REGION 1..726: note = NK77.17_CD70_DB02_B06 construct
MALPVTALLLPLALLLHAARPDYKDDDDKGGGGSGGGGSQVQLVQSGAEVKKPGASVKVSCKASGYTFTDYYMHWVRQAPGQGLEWMGIINPNSGGTNYAQKFQGRVTMTRDTSTSTVYMELSSLRSEDTAVYYCARDFSVYAAADGMDVWGQGTLVTVSSGGGGSGGGGSGGGGSDIQMTQSPSSLSASVGDRVTITCRASQSISSYLNWYQQKPGKAPKLLIYDASNLATGVPSRFSGSGSGTDFTLTISSLQPEDFATYYCQQSDSSPLTFGQGTKVEIKTTTPAPRPPTPAPTIASQPLSLRPEACRPAAGGAVHTRGLDFACDIYIWAPLAGTCGVLLLSLVITLYCRRDQRLPPDAHKPPGGGSFRTPIQEEQADAHSTLAKIRVKFSRSADAPAYQQGQNQLYNELNLGRREEYDVLDKRRGRDPEMGGKPRRKNPQEGLYNELQKDKMAEAYSEIGMKGERRRGKGHDGLYQGLSTATKDTYDALHMQALPPRGSGEGRGSLLTCGDVEENPGPMALPVTALLLPLALLLHAARPNWVNVISDLKKIEDLIQSMHIDATLYTESDVHPSCKVTAMKCFLLELQVISLESGDASIHDTVENLIILANNSLSSNGNVTESGCKECEELEEKNIKEFLQSFVHIVQMFINTSTTTPAPRPPTPAPTIASQPLSLRPEACRPAAGGAVHTRGLDFACDIYIWAPLAGTCGVLLLSLVITLYC

SEQ ID NO: 329 - protein, 725 aa, synthetic construct
  REGION 1..725: note = NK77.18_CD70_DB02_B09 construct
MALPVTALLLPLALLLHAARPDYKDDDDKGGGGSGGGGSQVQLVQSGAEVKKPGASVKVSCKASGYTFTGYYMHWVRQAPGQGLEWMGIINPGDGGTIYAQNFQGRVTMTRDTSTSTVYMELSSLRSEDTAVYYCARGFGESAPDAFDIWGQGTMVTVSSGGGGSGGGGSGGGGSDIQMTQSPSSLSASVGDRVTITCQASQDISNYLNWYQQKPGKAPKLLIYGATTLQSGVPSRFSGSGSGTDFTLTISSLQPEDFATYYCQQADSFPYTFGQGTKLEIKTTTPAPRPPTPAPTIASQPLSLRPEACRPAAGGAVHTRGLDFACDIYIWAPLAGTCGVLLLSLVITLYCRRDQRLPPDAHKPPGGGSFRTPIQEEQADAHSTLAKIRVKFSRSADAPAYQQGQNQLYNELNLGRREEYDVLDKRRGRDPEMGGKPRRKNPQEGLYNELQKDKMAEAYSEIGMKGERRRGKGHDGLYQGLSTATKDTYDALHMQALPPRGSGEGRGSLLTCGDVEENPGPMALPVTALLLPLALLLHAARPNWVNVISDLKKIEDLIQSMHIDATLYTESDVHPSCKVTAMKCFLLELQVISLESGDASIHDTVENLIILANNSLSSNGNVTESGCKECEELEEKNIKEFLQSFVHIVQMFINTSTTTPAPRPPTPAPTIASQPLSLRPEACRPAAGGAVHTRGLDFACDIYIWAPLAGTCGVLLLSLVITLYC

SEQ ID NO: 330 - protein, 722 aa, synthetic construct
  REGION 1..722: note = NK77.19_CD70_DB02_C03 construct
MALPVTALLLPLALLLHAARPDYKDDDDKGGGGSGGGGSQVQLVQSGAEVKKPGASVKVSCKASGYTFTGYYMHWVRQAPGQGLEWMGIINPSGGSTSYAQKFQGRVTMTRDTSTSTVYMELSSLRSEDTAVYYCAAGTEIYYMDVWGKGTTVTVSSGGGGSGGGGSGGGGSDIQMTQSPSSLSASVGDRVTITCRASQTIDIYLNWYQQKPGKAPKLLIYDASNLETGVPSRFSGSGSGTDFTLTISSLQPEDFATYYCQQADSFPLTFGGGTKVEIKTTTPAPRPPTPAPTIASQPLSLRPEACRPAAGGAVHTRGLDFACDIYIWAPLAGTCGVLLLSLVITLYCRRDQRLPPDAHKPPGGGSFRTPIQEEQADAHSTLAKIRVKFSRSADAPAYQQGQNQLYNELNLGRREEYDVLDKRRGRDPEMGGKPRRKNPQEGLYNELQKDKMAEAYSEIGMKGERRRGKGHDGLYQGLSTATKDTYDALHMQALPPRGSGEGRGSLLTCGDVEENPGPMALPVTALLLPLALLLHAARPNWVNVISDLKKIEDLIQSMHIDATLYTESDVHPSCKVTAMKCFLLELQVISLESGDASIHDTVENLIILANNSLSSNGNVTESGCKECEELEEKNIKEFLQSFVHIVQMFINTSTTTPAPRPPTPAPTIASQPLSLRPEACRPAAGGAVHTRGLDFACDIYIWAPLAGTCGVLLLSLVITLYC

SEQ ID NO: 331 - protein, 731 aa, synthetic construct
  REGION 1..731: note = NK77.20_CD70_DB02_C04 construct
MALPVTALLLPLALLLHAARPDYKDDDDKGGGGSGGGGSQVQLVQSGAEVKKPGASVKVSCKASGGTFSSYAISWVRQAPGQGLEWMGMINPSDGATTYAQKFQGRVTMTRDTSTSTVYMELSSLRSEDTAVYYCARERELLHFATNYYYYGMDVWGQGTTVTVSSGGGGSGGGGSGGGGSDIQMTQSPSSLSASVGDRVTITCRASQGISNNLNWYQQKPGKAPKLLIYAASSLHSGVPSRFSGSGSGTDFTLTISSLQPEDFATYYCQQADAFPLTFGGGTKVEIKTTTPAPRPPTPAPTIASQPLSLRPEACRPAAGGAVHTRGLDFACDIYIWAPLAGTCGVLLLSLVITLYCRRDQRLPPDAHKPPGGGSFRTPIQEEQADAHSTLAKIRVKFSRSADAPAYQQGQNQLYNELNLGRREEYDVLDKRRGRDPEMGGKPRRKNPQEGLYNELQKDKMAEAYSEIGMKGERRRGKGHDGLYQGLSTATKDTYDALHMQALPPRGSGEGRGSLLTCGDVEENPGPMALPVTALLLPLALLLHAARPNWVNVISDLKKIEDLIQSMHIDATLYTESDVHPSCKVTAMKCFLLELQVISLESGDASIHDTVENLIILANNSLSSNGNVTESGCKECEELEEKNIKEFLQSFVHIVQMFINTSTTTPAPRPPTPAPTIASQPLSLRPEACRPAAGGAVHTRGLDFACDIYIWAPLAGTCGVLLLSLVITLYC

SEQ ID NO: 332 - protein, 727 aa, synthetic construct
  REGION 1..727: note = NK77.22_CD70_DB02_C07 construct
MALPVTALLLPLALLLHAARPDYKDDDDKGGGGSGGGGSQVQLVQSGAEVKKPGASVKVSCKASGYTFTRNYMHWVRQAPGQGLEWMGWISPDNGVTNYAQNFQGRVTMTRDTSTSTVYMELSSLRSEDTAVYYCAKTQGSSSWYQWYFDLWGRGTLVTVSSGGGGSGGGGSGGGGSDIQMTQSPSSLSASVGDRVTITCRASQSIGTWLAWYQQKPGKAPKLLIYAASSLQSGVPSRFSGSGSGTDFTLTISSLQPEDFATYYCQQSYTTPITFGQGTKVEIKTTTPAPRPPTPAPTIASQPLSLRPEACRPAAGGAVHTRGLDFACDIYIWAPLAGTCGVLLLSLVITLYCRRDQRLPPDAHKPPGGGSFRTPIQEEQADAHSTLAKIRVKFSRSADAPAYQQGQNQLYNELNLGRREEYDVLDKRRGRDPEMGGKPRRKNPQEGLYNELQKDKMAEAYSEIGMKGERRRGKGHDGLYQGLSTATKDTYDALHMQALPPRGSGEGRGSLLTCGDVEENPGPMALPVTALLLPLALLLHAARPNWVNVISDLKKIEDLIQSMHIDATLYTESDVHPSCKVTAMKCFLLELQVISLESGDASIHDTVENLIILANNSLSSNGNVTESGCKECEELEEKNIKEFLQSFVHIVQMFINTSTTTPAPRPPTPAPTIASQPLSLRPEACRPAAGGAVHTRGLDFACDIYIWAPLAGTCGVLLLSLVITLYC

SEQ ID NO: 333 - protein, 723 aa, synthetic construct
  REGION 1..723: note = NK77.24_CD70_DB02_D02 construct
MALPVTALLLPLALLLHAARPDYKDDDDKGGGGSGGGGSQVQLVQSGAEVKKPGASVKVSCKASGYTFTSYYMHWVRQAPGQGLEWMGIIDPGSGDTSYAQKFQGRVTMTRDTSTSTVYMELSSLRSEDTAVYYCARGSNWYDYFDYWGQGTLVTVSSGGGGSGGGGSGGGGSEIVMTQSPATLSVSPGERATLSCRASQSVSSYLAWYQQKPGQAPRLLIYGASTRATGIPARFSGSGSGTEFTLTISSLQSEDFAVYYCQQYDSYPPTFGGGTKVEIKTTTPAPRPPTPAPTIASQPLSLRPEACRPAAGGAVHTRGLDFACDIYIWAPLAGTCGVLLLSLVITLYCRRDQRLPPDAHKPPGGGSFRTPIQEEQADAHSTLAKIRVKFSRSADAPAYQQGQNQLYNELNLGRREEYDVLDKRRGRDPEMGGKPRRKNPQEGLYNELQKDKMAEAYSEIGMKGERRRGKGHDGLYQGLSTATKDTYDALHMQALPPRGSGEGRGSLLTCGDVEENPGPMALPVTALLLPLALLLHAARPNWVNVISDLKKIEDLIQSMHIDATLYTESDVHPSCKVTAMKCFLLELQVISLESGDASIHDTVENLIILANNSLSSNGNVTESGCKECEELEEKNIKEFLQSFVHIVQMFINTSTTTPAPRPPTPAPTIASQPLSLRPEACRPAAGGAVHTRGLDFACDIYIWAPLAGTCGVLLLSLVITLYC

SEQ ID NO: 334 - protein, 723 aa, synthetic construct
  REGION 1..723: note = NK77.25_CD70_DB02_D04 construct
MALPVTALLLPLALLLHAARPDYKDDDDKGGGGSGGGGSQVQLVQSGAEVKKPGASVKVSCKASGYRLSDHYMHWVRQAPGQGLEWMGIINPSGGSTTYAQNFQGRVTMTRDTSTSTVYMELSSLRSEDTAVYYCASSYYGDYVLVNWGQGTLVTVSSGGGGSGGGGSGGGGSDIQMTQSPSSLSASVGDRVTITCQASQDISNYLNWYQQKPGKAPKLLIYAASTLESGVPSRFSGSGSGTDFTLTISSLQPEDFATYYCLQDYDYPLTFGQGTKLEIKTTTPAPRPPTPAPTIASQPLSLRPEACRPAAGGAVHTRGLDFACDIYIWAPLAGTCGVLLLSLVITLYCRRDQRLPPDAHKPPGGGSFRTPIQEEQADAHSTLAKIRVKFSRSADAPAYQQGQNQLYNELNLGRREEYDVLDKRRGRDPEMGGKPRRKNPQEGLYNELQKDKMAEAYSEIGMKGERRRGKGHDGLYQGLSTATKDTYDALHMQALPPRGSGEGRGSLLTCGDVEENPGPMALPVTALLLPLALLLHAARPNWVNVISDLKKIEDLIQSMHIDATLYTESDVHPSCKVTAMKCFLLELQVISLESGDASIHDTVENLIILANNSLSSNGNVTESGCKECEELEEKNIKEFLQSFVHIVQMFINTSTTTPAPRPPTPAPTIASQPLSLRPEACRPAAGGAVHTRGLDFACDIYIWAPLAGTCGVLLLSLVITLYC

SEQ ID NO: 335 - protein, 724 aa, synthetic construct
  REGION 1..724: note = NK77.26_CD70_DB02_D10 construct
MALPVTALLLPLALLLHAARPDYKDDDDKGGGGSGGGGSQVQLVQSGAEVKKPGASVKVSCKASGYTFTDYYVHWVRQAPGQGLEWMGWINPNTGGTSFAQNFQGRVTMTRDTSTSTVYMELSSLRSEDTAVYYCARDLGQWLGEIDYWGQGTLVTVSSGGGGSGGGGSGGGGSDIQMTQSPSSLSASVGDRVTITCRASQTIYKWLAWYQQKPGKAPKLLIYDASSLESGVPSRFSGSGSGTDFTLTISSLQPEDFATYYCQQANSFPFTFGPGTKVDIKTTTPAPRPPTPAPTIASQPLSLRPEACRPAAGGAVHTRGLDFACDIYIWAPLAGTCGVLLLSLVITLYCRRDQRLPPDAHKPPGGGSFRTPIQEEQADAHSTLAKIRVKFSRSADAPAYQQGQNQLYNELNLGRREEYDVLDKRRGRDPEMGGKPRRKNPQEGLYNELQKDKMAEAYSEIGMKGERRRGKGHDGLYQGLSTATKDTYDALHMQALPPRGSGEGRGSLLTCGDVEENPGPMALPVTALLLPLALLLHAARPNWVNVISDLKKIEDLIQSMHIDATLYTESDVHPSCKVTAMKCFLLELQVISLESGDASIHDTVENLIILANNSLSSNGNVTESGCKECEELEEKNIKEFLQSFVHIVQMFINTSTTTPAPRPPTPAPTIASQPLSLRPEACRPAAGGAVHTRGLDFACDIYIWAPLAGTCGVLLLSLVITLYC

SEQ ID NO: 336 - protein, 728 aa, synthetic construct
  REGION 1..728: note = NK77.27_CD70_DB02_D11 construct
MALPVTALLLPLALLLHAARPDYKDDDDKGGGGSGGGGSQVQLVQSGAEVKKPGASVKVSCKASGYTFTDYTDYFVHWVRQAPGQGLEWMGIFNPSDGSTSYAQEFQGRVTMTRDTSTSTVYMELSSLRSEDTAVYYCARGPYSSSWYYFDYWGQGTLVTVSSGGGGSGGGGSGGGGSDIQMTQSPSSLSASVGDRVTITCQASQDISNYLNWYQQKPGKAPKLLIYDASNLETGVPSRFSGSGSGTDFTLTISSLQPEDFATYYCQQAHSFPPTFGQGTKVEIKTTTPAPRPPTPAPTIASQPLSLRPEACRPAAGGAVHTRGLDFACDIYIWAPLAGTCGVLLLSLVITLYCRRDQRLPPDAHKPPGGGSFRTPIQEEQADAHSTLAKIRVKFSRSADAPAYQQGQNQLYNELNLGRREEYDVLDKRRGRDPEMGGKPRRKNPQEGLYNELQKDKMAEAYSEIGMKGERRRGKGHDGLYQGLSTATKDTYDALHMQALPPRGSGEGRGSLLTCGDVEENPGPMALPVTALLLPLALLLHAARPNWVNVISDLKKIEDLIQSMHIDATLYTESDVHPSCKVTAMKCFLLELQVISLESGDASIHDTVENLIILANNSLSSNGNVTESGCKECEELEEKNIKEFLQSFVHIVQMFINTSTTTPAPRPPTPAPTIASQPLSLRPEACRPAAGGAVHTRGLDFACDIYIWAPLAGTCGVLLLSLVITLYC

SEQ ID NO: 337 - protein, 724 aa, synthetic construct
  REGION 1..724: note = NK77.28_CD70_DB02_E04 construct
MALPVTALLLPLALLLHAARPDYKDDDDKGGGGSGGGGSQVQLVQSGAEVKKPGASVKVSCKASGYIFTDYYMHWVRQAPGQGLEWMGIINPSGGDTLYAQKFQGRVTMTRDTSTSTVYMELSSLRSEDTAVYYCAREGVGAMGVFDYWGQGTLVTVSSGGGGSGGGGSGGGGSDIQMTQSPSSLSASVGDRVTITCRASTSISDYVHWYQQKPGKAPKLLIYDASSLQSGVPSRFSGSGSGTDFTLTISSLQPEDFATYYCQQSDSTPPTFGGGTKVEIKTTTPAPRPPTPAPTIASQPLSLRPEACRPAAGGAVHTRGLDFACDIYIWAPLAGTCGVLLLSLVITLYCRRDQRLPPDAHKPPGGGSFRTPIQEEQADAHSTLAKIRVKFSRSADAPAYQQGQNQLYNELNLGRREEYDVLDKRRGRDPEMGGKPRRKNPQEGLYNELQKDKMAEAYSEIGMKGERRRGKGHDGLYQGLSTATKDTYDALHMQALPPRGSGEGRGSLLTCGDVEENPGPMALPVTALLLPLALLLHAARPNWVNVISDLKKIEDLIQSMHIDATLYTESDVHPSCKVTAMKCFLLELQVISLESGDASIHDTVENLIILANNSLSSNGNVTESGCKECEELEEKNIKEFLQSFVHIVQMFINTSTTTPAPRPPTPAPTIASQPLSLRPEACRPAAGGAVHTRGLDFACDIYIWAPLAGTCGVLLLSLVITLYC

SEQ ID NO: 338 - protein, 726 aa, synthetic construct
  REGION 1..726: note = NK77.29_CD70_DB02_F06 construct
MALPVTALLLPLALLLHAARPDYKDDDDKGGGGSGGGGSQVQLVQSGAEVKKPGASVKVSCKASGYTFTDHYIHWVRQAPGQGLEWMGWISAYNGKTNYAQKFQGRVTMTRDTSTSTVYMELSSLRSEDTAVYYCARDTIYYDFWSGYDYWGQGTLVTVSSGGGGSGGGGSGGGGSDIQMTQSPSSLSASVGDRVTITCRASQGISNNLNWYQQKPGKAPKLLIYYASTLQSGVPSRFSGSGSGTDFTLTISSLQPEDFATYYCQQSYSTPITFGQGTRLEIKTTTPAPRPPTPAPTIASQPLSLRPEACRPAAGGAVHTRGLDFACDIYIWAPLAGTCGVLLLSLVITLYCRRDQRLPPDAHKPPGGGSFRTPIQEEQADAHSTLAKIRVKFSRSADAPAYQQGQNQLYNELNLGRREEYDVLDKRRGRDPEMGGKPRRKNPQEGLYNELQKDKMAEAYSEIGMKGERRRGKGHDGLYQGLSTATKDTYDALHMQALPPRGSGEGRGSLLTCGDVEENPGPMALPVTALLLPLALLLHAARPNWVNVISDLKKIEDLIQSMHIDATLYTESDVHPSCKVTAMKCFLLELQVISLESGDASIHDTVENLIILANNSLSSNGNVTESGCKECEELEEKNIKEFLQSFVHIVQMFINTSTTTPAPRPPTPAPTIASQPLSLRPEACRPAAGGAVHTRGLDFACDIYIWAPLAGTCGVLLLSLVITLYC

SEQ ID NO: 339 - protein, 726 aa, synthetic construct
  REGION 1..726: note = NK77.31_CD70_DB02_F08 construct
MALPVTALLLPLALLLHAARPDYKDDDDKGGGGSGGGGSQVQLVQSGAEVKKPGASVKVSCKASGYTFTSYYMHWVRQAPGQGLEWMGIINPSGGATIYAQKFQGRVTMTRDTSTSTVYMELSSLRSEDTAVYYCARSRGDYYGSGDFDYWGQGTLVTVSSGGGGSGGGGSGGGGSDIQMTQSPSSLSASVGDRVTITCRASQTISNYLNWYQQKPGKAPKLLIYDASTLEAGVPSRFSGSGSGTDFTLTISSLQPEDFATYYCQQSYNPPYTFGQGTKLEIKTTTPAPRPPTPAPTIASQPLSLRPEACRPAAGGAVHTRGLDFACDIYIWAPLAGTCGVLLLSLVITLYCRRDQRLPPDAHKPPGGGSFRTPIQEEQADAHSTLAKIRVKFSRSADAPAYQQGQNQLYNELNLGRREEYDVLDKRRGRDPEMGGKPRRKNPQEGLYNELQKDKMAEAYSEIGMKGERRRGKGHDGLYQGLSTATKDTYDALHMQALPPRGSGEGRGSLLTCGDVEENPGPMALPVTALLLPLALLLHAARPNWVNVISDLKKIEDLIQSMHIDATLYTESDVHPSCKVTAMKCFLLELQVISLESGDASIHDTVENLIILANNSLSSNGNVTESGCKECEELEEKNIKEFLQSFVHIVQMFINTSTTTPAPRPPTPAPTIASQPLSLRPEACRPAAGGAVHTRGLDFACDIYIWAPLAGTCGVLLLSLVITLYC

SEQ ID NO: 340 - protein, 722 aa, synthetic construct
  REGION 1..722: note = NK77.32_CD70_DB02_G07 construct
MALPVTALLLPLALLLHAARPDYKDDDDKGGGGSGGGGSQVQLVQSGAEVKKPGASVKVSCKASGYTFTDYYMHWVRQAPGQGLEWMGIINPSGGSTSYAQKFQGRVTMTRDTSTSTVYMELSSLRSEDTAVYYCARGYFDHAFDIWGQGTMVTVSSGGGGSGGGGSGGGGSDIQMTQSPSSLSASVGDRVTITCRASQSISTYLNWYQQKPGKAPKLLIYDASNLEIGVPSRFSGSGSGTDFTLTISSLQPEDFATYYCQQSDSSPLTFGQGTKVEIKTTTPAPRPPTPAPTIASQPLSLRPEACRPAAGGAVHTRGLDFACDIYIWAPLAGTCGVLLLSLVITLYCRRDQRLPPDAHKPPGGGSFRTPIQEEQADAHSTLAKIRVKFSRSADAPAYQQGQNQLYNELNLGRREEYDVLDKRRGRDPEMGGKPRRKNPQEGLYNELQKDKMAEAYSEIGMKGERRRGKGHDGLYQGLSTATKDTYDALHMQALPPRGSGEGRGSLLTCGDVEENPGPMALPVTALLLPLALLLHAARPNWVNVISDLKKIEDLIQSMHIDATLYTESDVHPSCKVTAMKCFLLELQVISLESGDASIHDTVENLIILANNSLSSNGNVTESGCKECEELEEKNIKEFLQSFVHIVQMFINTSTTTPAPRPPTPAPTIASQPLSLRPEACRPAAGGAVHTRGLDFACDIYIWAPLAGTCGVLLLSLVITLYC

SEQ ID NO: 341 - protein, 728 aa, synthetic construct
  REGION 1..728: note = NK77.33_CD70_DB02_H04 construct
MALPVTALLLPLALLLHAARPDYKDDDDKGGGGSGGGGSQVQLVQSGAEVKKPGASVKVSCKASGYTFTGYYMHWVRQAPGQGLEWMGIINPSGGDTIYAQKFQGRVTMTRDTSTSTVYMELSSLRSEDTAVYYCARGDSSSWYDYYYYMDVWGKGTTVTVSSGGGGSGGGGSGGGGSDIQMTQSPSSLSASVGDRVTITCQASQDISNYLNWYQQKPGKAPKLLIYAASSLQSGVPSRFSGSGSGTDFTLTISSLQPEDFATYYCQQSYRTPLTFGGGTKVEIKTTTPAPRPPTPAPTIASQPLSLRPEACRPAAGGAVHTRGLDFACDIYIWAPLAGTCGVLLLSLVITLYCRRDQRLPPDAHKPPGGGSFRTPIQEEQADAHSTLAKIRVKFSRSADAPAYQQGQNQLYNELNLGRREEYDVLDKRRGRDPEMGGKPRRKNPQEGLYNELQKDKMAEAYSEIGMKGERRRGKGHDGLYQGLSTATKDTYDALHMQALPPRGSGEGRGSLLTCGDVEENPGPMALPVTALLLPLALLLHAARPNWVNVISDLKKIEDLIQSMHIDATLYTESDVHPSCKVTAMKCFLLELQVISLESGDASIHDTVENLIILANNSLSSNGNVTESGCKECEELEEKNIKEFLQSFVHIVQMFINTSTTTPAPRPPTPAPTIASQPLSLRPEACRPAAGGAVHTRGLDFACDIYIWAPLAGTCGVLLLSLVITLYC

SEQ ID NO: 342 - protein, 723 aa, synthetic construct
  REGION 1..723: note = NK77.34_CD70_DB02_H05 construct
MALPVTALLLPLALLLHAARPDYKDDDDKGGGGSGGGGSQVQLVQSGAEVKKPGASVKVSCKASGYTFTDYFTHWVRQAPGQGLEWMGWINTYDGNTNYAQKFQGRVTMTRDTSTSTVYMELSSLRSEDTAVYYCAREMEWLGQVDYWGQGTLVTVSSGGGGSGGGGSGGGGSDIQMTQSPSSLSASVGDRVTITCRASQDIRNDLGWYQQKPGKAPKLLIYAASNLETGVPSRFSGSGSGTDFTLTISSLQPEDFATYYCQQSYSAPFTFGPGTKVDIKTTTPAPRPPTPAPTIASQPLSLRPEACRPAAGGAVHTRGLDFACDIYIWAPLAGTCGVLLLSLVITLYCRRDQRLPPDAHKPPGGGSFRTPIQEEQADAHSTLAKIRVKFSRSADAPAYQQGQNQLYNELNLGRREEYDVLDKRRGRDPEMGGKPRRKNPQEGLYNELQKDKMAEAYSEIGMKGERRRGKGHDGLYQGLSTATKDTYDALHMQALPPRGSGEGRGSLLTCGDVEENPGPMALPVTALLLPLALLLHAARPNWVNVISDLKKIEDLIQSMHIDATLYTESDVHPSCKVTAMKCFLLELQVISLESGDASIHDTVENLIILANNSLSSNGNVTESGCKECEELEEKNIKEFLQSFVHIVQMFINTSTTTPAPRPPTPAPTIASQPLSLRPEACRPAAGGAVHTRGLDFACDIYIWAPLAGTCGVLLLSLVITLYC

SEQ ID NO: 343 - protein, 723 aa, synthetic construct
  REGION 1..723: note = NK77.35_CD70_DB02_H08 construct
MALPVTALLLPLALLLHAARPDYKDDDDKGGGGSGGGGSQVQLVQSGAEVKKPGASVKVSCKASGYTFTSYYIHWVRQAPGQGLEWMGRINPNGGGTNYAQKFQGRVTMTRDTSTSTVYMELSSLRSEDTAVYYCARGHRGGGGIDYWGQGTLVTVSSGGGGSGGGGSGGGGSDIQMTQSPSSLSASVGDRVTITCRASQEISNYLAWYQQKPGKAPKLLIYDASNLQTGVPSRFSGSGSGTDFTLTISSLQPEDFATYYCQQSYSTPFTFGPGTKVDIKTTTPAPRPPTPAPTIASQPLSLRPEACRPAAGGAVHTRGLDFACDIYIWAPLAGTCGVLLLSLVITLYCRRDQRLPPDAHKPPGGGSFRTPIQEEQADAHSTLAKIRVKFSRSADAPAYQQGQNQLYNELNLGRREEYDVLDKRRGRDPEMGGKPRRKNPQEGLYNELQKDKMAEAYSEIGMKGERRRGKGHDGLYQGLSTATKDTYDALHMQALPPRGSGEGRGSLLTCGDVEENPGPMALPVTALLLPLALLLHAARPNWVNVISDLKKIEDLIQSMHIDATLYTESDVHPSCKVTAMKCFLLELQVISLESGDASIHDTVENLIILANNSLSSNGNVTESGCKECEELEEKNIKEFLQSFVHIVQMFINTSTTTPAPRPPTPAPTIASQPLSLRPEACRPAAGGAVHTRGLDFACDIYIWAPLAGTCGVLLLSLVITLYC

SEQ ID NO: 344 - protein, 723 aa, synthetic construct
  REGION 1..723: note = NK77.36_CD70_DB03_A06 construct
MALPVTALLLPLALLLHAARPDYKDDDDKGGGGSGGGGSQVQLVQSGAEVKKPGASVKVSCKASGGTFSSYAISWVRQAPGQGLEWMGWISPNSGDTHYAQKFQGRVTMTRDTSTSTVYMELSSLRSEDTAVYYCARDWGSGWYVDYWGQGTLVTVSSGGGGSGGGGSGGGGSDIQMTQSPSSLSASVGDRVTITCQASQDISDSLNWYQQKPGKAPKLLIYSASSLQSGVPSRFSGSGSGTDFTLTISSLQPEDFATYYCQQSFTTPYTFGQGTKVEIKTTTPAPRPPTPAPTIASQPLSLRPEACRPAAGGAVHTRGLDFACDIYIWAPLAGTCGVLLLSLVITLYCRRDQRLPPDAHKPPGGGSFRTPIQEEQADAHSTLAKIRVKFSRSADAPAYQQGQNQLYNELNLGRREEYDVLDKRRGRDPEMGGKPRRKNPQEGLYNELQKDKMAEAYSEIGMKGERRRGKGHDGLYQGLSTATKDTYDALHMQALPPRGSGEGRGSLLTCGDVEENPGPMALPVTALLLPLALLLHAARPNWVNVISDLKKIEDLIQSMHIDATLYTESDVHPSCKVTAMKCFLLELQVISLESGDASIHDTVENLIILANNSLSSNGNVTESGCKECEELEEKNIKEFLQSFVHIVQMFINTSTTTPAPRPPTPAPTIASQPLSLRPEACRPAAGGAVHTRGLDFACDIYIWAPLAGTCGVLLLSLVITLYC

SEQ ID NO: 345 - protein, 723 aa, synthetic construct
  REGION 1..723: note = NK77.37_CD70_DB03_A07 construct
MALPVTALLLPLALLLHAARPDYKDDDDKGGGGSGGGGSQVQLVQSGAEVKKPGSSVKVSCKASGGTFNSYGISWVRQAPGQGLEWMGGIIPIFGTANYAQKFQGRVTITADESTSTAYMELSSLRSEDTAVYYCARDTYGDDAFDIWGQGTMVTVSSGGGGSGGGGSGGGGSDIQMTQSPSSLSASVGDRVTITCRASQSISSWLAWYQQKPGKAPKLLIYDASNLETGVPSRFSGSGSGTDFTLTISSLQPEDFATYYCQQNFSPPLTFGQGTRLEIKTTTPAPRPPTPAPTIASQPLSLRPEACRPAAGGAVHTRGLDFACDIYIWAPLAGTCGVLLLSLVITLYCRRDQRLPPDAHKPPGGGSFRTPIQEEQADAHSTLAKIRVKFSRSADAPAYQQGQNQLYNELNLGRREEYDVLDKRRGRDPEMGGKPRRKNPQEGLYNELQKDKMAEAYSEIGMKGERRRGKGHDGLYQGLSTATKDTYDALHMQALPPRGSGEGRGSLLTCGDVEENPGPMALPVTALLLPLALLLHAARPNWVNVISDLKKIEDLIQSMHIDATLYTESDVHPSCKVTAMKCFLLELQVISLESGDASIHDTVENLIILANNSLSSNGNVTESGCKECEELEEKNIKEFLQSFVHIVQMFINTSTTTPAPRPPTPAPTIASQPLSLRPEACRPAAGGAVHTRGLDFACDIYIWAPLAGTCGVLLLSLVITLYC

SEQ ID NO: 346 - protein, 728 aa, synthetic construct
  REGION 1..728: note = NK77.38_CD70_DB03_A08 construct
MALPVTALLLPLALLLHAARPDYKDDDDKGGGGSGGGGSQVQLVQSGAEVKKPGASVKVSCKASGYSFTSYYMHWVRQAPGQGLEWMGIINPSGGTTSYAQKFQGRVTMTRDTSTSTVYMELSSLRSEDTAVYYCARDNSPYSSSWWDYFDYWGQGTLVTVSSGGGGSGGGGSGGGGSDIQMTQSPSSLSASVGDRVTITCRASQDIRHYLAWYQQKPGKAPKLLIYDASSLQSGVPSRFSGSGSGTDFTLTISSLQPEDFATYYCQQTYDAPITFGQGTRLEIKTTTPAPRPPTPAPTIASQPLSLRPEACRPAAGGAVHTRGLDFACDIYIWAPLAGTCGVLLLSLVITLYCRRDQRLPPDAHKPPGGGSFRTPIQEEQADAHSTLAKIRVKFSRSADAPAYQQGQNQLYNELNLGRREEYDVLDKRRGRDPEMGGKPRRKNPQEGLYNELQKDKMAEAYSEIGMKGERRRGKGHDGLYQGLSTATKDTYDALHMQALPPRGSGEGRGSLLTCGDVEENPGPMALPVTALLLPLALLLHAARPNWVNVISDLKKIEDLIQSMHIDATLYTESDVHPSCKVTAMKCFLLELQVISLESGDASIHDTVENLIILANNSLSSNGNVTESGCKECEELEEKNIKEFLQSFVHIVQMFINTSTTTPAPRPPTPAPTIASQPLSLRPEACRPAAGGAVHTRGLDFACDIYIWAPLAGTCGVLLLSLVITLYC

SEQ ID NO: 347 - protein, 726 aa, synthetic construct
  REGION 1..726: note = NK77.39_CD70_DB03_A09 construct
MALPVTALLLPLALLLHAARPDYKDDDDKGGGGSGGGGSQVQLVQSGAEVKKPGASVKVSCKASGYTFTDYYIHWVRQAPGQGLEWMGWITPNSGYTYYAQNFQGRVTMTRDTSTSTVYMELSSLRSEDTAVYYCARNTDCYGDFLGLDVWGQGTTVTVSSGGGGSGGGGSGGGGSDIVMTQSPDSLAVSLGERATINCRASSSISNYLAWYQQKPGQPPKLLIYGASTRASGVPDRFSGSGSGTDFTLTISSLQAEDVAVYYCQQSYSTPLTFGQGTKVEIKTTTPAPRPPTPAPTIASQPLSLRPEACRPAAGGAVHTRGLDFACDIYIWAPLAGTCGVLLLSLVITLYCRRDQRLPPDAHKPPGGGSFRTPIQEEQADAHSTLAKIRVKFSRSADAPAYQQGQNQLYNELNLGRREEYDVLDKRRGRDPEMGGKPRRKNPQEGLYNELQKDKMAEAYSEIGMKGERRRGKGHDGLYQGLSTATKDTYDALHMQALPPRGSGEGRGSLLTCGDVEENPGPMALPVTALLLPLALLLHAARPNWVNVISDLKKIEDLIQSMHIDATLYTESDVHPSCKVTAMKCFLLELQVISLESGDASIHDTVENLIILANNSLSSNGNVTESGCKECEELEEKNIKEFLQSFVHIVQMFINTSTTTPAPRPPTPAPTIASQPLSLRPEACRPAAGGAVHTRGLDFACDIYIWAPLAGTCGVLLLSLVITLYC

SEQ ID NO: 348 - protein, 726 aa, synthetic construct
  REGION 1..726: note = NK77.40_CD70_DB03_A11 construct
MALPVTALLLPLALLLHAARPDYKDDDDKGGGGSGGGGSQVQLVQSGAEVKKPGASVKVSCKASGYTFNGYLMHWVRQAPGQGLEWMGIVNPSDGSTGYAQKFQGRVTMTRDTSTSTVYMELSSLRSEDTAVYYCAKDTGLRYFDWLLDYWGQGTLVTVSSGGGGSGGGGSGGGGSDIQMTQSPSSLSASVGDRVTITCRASQGITNFLAWYQQKPGKAPKLLIYDASNLETGVPSRFSGSGSGTDFTLTISSLQPEDFATYYCQQSYGAPLTFGQGTRLEIKTTTPAPRPPTPAPTIASQPLSLRPEACRPAAGGAVHTRGLDFACDIYIWAPLAGTCGVLLLSLVITLYCRRDQRLPPDAHKPPGGGSFRTPIQEEQADAHSTLAKIRVKFSRSADAPAYQQGQNQLYNELNLGRREEYDVLDKRRGRDPEMGGKPRRKNPQEGLYNELQKDKMAEAYSEIGMKGERRRGKGHDGLYQGLSTATKDTYDALHMQALPPRGSGEGRGSLLTCGDVEENPGPMALPVTALLLPLALLLHAARPNWVNVISDLKKIEDLIQSMHIDATLYTESDVHPSCKVTAMKCFLLELQVISLESGDASIHDTVENLIILANNSLSSNGNVTESGCKECEELEEKNIKEFLQSFVHIVQMFINTSTTTPAPRPPTPAPTIASQPLSLRPEACRPAAGGAVHTRGLDFACDIYIWAPLAGTCGVLLLSLVITLYC

SEQ ID NO: 349 - protein, 722 aa, synthetic construct
  REGION 1..722: note = NK77.41_CD70_DB03_A12 construct
MALPVTALLLPLALLLHAARPDYKDDDDKGGGGSGGGGSQVQLVQSGAEVKKPGASVKVSCKASGYTFTSYYMHWVRQAPGQGLEWMGIIDPSGGRTIYAQRFQGRVTMTRDTSTSTVYMELSSLRSEDTAVYYCARHEAGGIFDYWGQGTLVTVSSGGGGSGGGGSGGGGSDIQMTQSPSSLSASVGDRVTITCQASQDISNYLNWYQQKPGKAPKLLIYSASTLQSGVPSRFSGSGSGTDFTLTISSLQPEDFATYYCQQSYSSPYRFGQGTKVEIKTTTPAPRPPTPAPTIASQPLSLRPEACRPAAGGAVHTRGLDFACDIYIWAPLAGTCGVLLLSLVITLYCRRDQRLPPDAHKPPGGGSFRTPIQEEQADAHSTLAKIRVKFSRSADAPAYQQGQNQLYNELNLGRREEYDVLDKRRGRDPEMGGKPRRKNPQEGLYNELQKDKMAEAYSEIGMKGERRRGKGHDGLYQGLSTATKDTYDALHMQALPPRGSGEGRGSLLTCGDVEENPGPMALPVTALLLPLALLLHAARPNWVNVISDLKKIEDLIQSMHIDATLYTESDVHPSCKVTAMKCFLLELQVISLESGDASIHDTVENLIILANNSLSSNGNVTESGCKECEELEEKNIKEFLQSFVHIVQMFINTSTTTPAPRPPTPAPTIASQPLSLRPEACRPAAGGAVHTRGLDFACDIYIWAPLAGTCGVLLLSLVITLYC

SEQ ID NO: 350 - protein, 730 aa, synthetic construct
  REGION 1..730: note = NK77.42_CD70_DB03_B01 construct
MALPVTALLLPLALLLHAARPDYKDDDDKGGGGSGGGGSQVQLVQSGAEVKKPGSSVKVSCKASGYTFSDSYMHWVRQAPGQGLEWVGGIIPMAGIPAYAEEFQGRVTITADESTSTAYMELSSLRSEDTAVYYCARADDYGGNWYFDLWGRGTLVTVSSGGGGSGGGGSGGGGSDIVMTQSPLSLPVTPGEPASISCRSSQSLLHSNGYNYLDWYLQKPGQSPQLLIYAASSLQSGVPDRFSGSGSGTDFTLKISRVEAEDVGVYYCMQGAHWPPTFGQGTKLEIKTTTPAPRPPTPAPTIASQPLSLRPEACRPAAGGAVHTRGLDFACDIYIWAPLAGTCGVLLLSLVITLYCRRDQRLPPDAHKPPGGGSFRTPIQEEQADAHSTLAKIRVKFSRSADAPAYQQGQNQLYNELNLGRREEYDVLDKRRGRDPEMGGKPRRKNPQEGLYNELQKDKMAEAYSEIGMKGERRRGKGHDGLYQGLSTATKDTYDALHMQALPPRGSGEGRGSLLTCGDVEENPGPMALPVTALLLPLALLLHAARPNWVNVISDLKKIEDLIQSMHIDATLYTESDVHPSCKVTAMKCFLLELQVISLESGDASIHDTVENLIILANNSLSSNGNVTESGCKECEELEEKNIKEFLQSFVHIVQMFINTSTTTPAPRPPTPAPTIASQPLSLRPEACRPAAGGAVHTRGLDFACDIYIWAPLAGTCGVLLLSLVITLYC

SEQ ID NO: 351 - protein, 724 aa, synthetic construct
  REGION 1..724: note = NK77.43_CD70_DB03_B04 construct
MALPVTALLLPLALLLHAARPDYKDDDDKGGGGSGGGGSQVQLVQSGAEVKKPGASVKVSCKASGYIFTDYYMHWVRQAPGQGLEWMGIINPSGGSTSYAQKFQGRVTMTRDTSTSTVYMELSSLRSEDTAVYYCARDSGWYESWFDPWGQGTLVTVSSGGGGSGGGGSGGGGSDIQMTQSPSSLSASVGDRVTITCRASQDIRDGLGWYQQKPGKAPKLLIYAASTLQSGVPSRFSGSGSGTDFTLTISSLQPEDFATYYCQQSYGTPPTFGQGTKVEIKTTTPAPRPPTPAPTIASQPLSLRPEACRPAAGGAVHTRGLDFACDIYIWAPLAGTCGVLLLSLVITLYCRRDQRLPPDAHKPPGGGSFRTPIQEEQADAHSTLAKIRVKFSRSADAPAYQQGQNQLYNELNLGRREEYDVLDKRRGRDPEMGGKPRRKNPQEGLYNELQKDKMAEAYSEIGMKGERRRGKGHDGLYQGLSTATKDTYDALHMQALPPRGSGEGRGSLLTCGDVEENPGPMALPVTALLLPLALLLHAARPNWVNVISDLKKIEDLIQSMHIDATLYTESDVHPSCKVTAMKCFLLELQVISLESGDASIHDTVENLIILANNSLSSNGNVTESGCKECEELEEKNIKEFLQSFVHIVQMFINTSTTTPAPRPPTPAPTIASQPLSLRPEACRPAAGGAVHTRGLDFACDIYIWAPLAGTCGVLLLSLVITLYC

SEQ ID NO: 352 - protein, 725 aa, synthetic construct
  REGION 1..725: note = NK77.44_CD70_DB03_B06 construct
MALPVTALLLPLALLLHAARPDYKDDDDKGGGGSGGGGSQVQLVQSGAEVKKPGASVKVSCKASGYTFTDYYLHWVRQAPGQGLEWMGWISAYNGNTNYAQKFQGRVTMTRDTSTSTVYMELSSLRSEDTAVYYCAREIVGATEDWYFDLWGRGTLVTVSSGGGGSGGGGSGGGGSEIVMTQSPATLSVSPGERATLSCRASQSVSSYLAWYQQKPGQAPRLLIYGASTRATGIPARFSGSGSGTEFTLTISSLQSEDFAVYYCQQYDSSPTFGQGTKVEIKTTTPAPRPPTPAPTIASQPLSLRPEACRPAAGGAVHTRGLDFACDIYIWAPLAGTCGVLLLSLVITLYCRRDQRLPPDAHKPPGGGSFRTPIQEEQADAHSTLAKIRVKFSRSADAPAYQQGQNQLYNELNLGRREEYDVLDKRRGRDPEMGGKPRRKNPQEGLYNELQKDKMAEAYSEIGMKGERRRGKGHDGLYQGLSTATKDTYDALHMQALPPRGSGEGRGSLLTCGDVEENPGPMALPVTALLLPLALLLHAARPNWVNVISDLKKIEDLIQSMHIDATLYTESDVHPSCKVTAMKCFLLELQVISLESGDASIHDTVENLIILANNSLSSNGNVTESGCKECEELEEKNIKEFLQSFVHIVQMFINTSTTTPAPRPPTPAPTIASQPLSLRPEACRPAAGGAVHTRGLDFACDIYIWAPLAGTCGVLLLSLVITLYC

SEQ ID NO: 353 - protein, 723 aa, synthetic construct
  REGION 1..723: note = NK77.45_CD70_DB03_B09 construct
MALPVTALLLPLALLLHAARPDYKDDDDKGGGGSGGGGSQVQLVQSGAEVKKPGASVKVSCKASGYTFTAYYLHWVRQAPGQGLEWMGMINPNNGGTIYAQTFQGRVTMTRDTSTSTVYMELSSLRSEDTAVYYCARDLGGYVLFDYWGQGTLVTVSSGGGGSGGGGSGGGGSDIQMTQSPSSLSASVGDRVTITCRASQSISSYLNWYQQKPGKAPKLLIYDASNLETGVPSRFSGSGSGTDFTLTISSLQPEDFATYYCQQSHSAPITFGQGTRLEIKTTTPAPRPPTPAPTIASQPLSLRPEACRPAAGGAVHTRGLDFACDIYIWAPLAGTCGVLLLSLVITLYCRRDQRLPPDAHKPPGGGSFRTPIQEEQADAHSTLAKIRVKFSRSADAPAYQQGQNQLYNELNLGRREEYDVLDKRRGRDPEMGGKPRRKNPQEGLYNELQKDKMAEAYSEIGMKGERRRGKGHDGLYQGLSTATKDTYDALHMQALPPRGSGEGRGSLLTCGDVEENPGPMALPVTALLLPLALLLHAARPNWVNVISDLKKIEDLIQSMHIDATLYTESDVHPSCKVTAMKCFLLELQVISLESGDASIHDTVENLIILANNSLSSNGNVTESGCKECEELEEKNIKEFLQSFVHIVQMFINTSTTTPAPRPPTPAPTIASQPLSLRPEACRPAAGGAVHTRGLDFACDIYIWAPLAGTCGVLLLSLVITLYC

SEQ ID NO: 354 - protein, 723 aa, synthetic construct
  REGION 1..723: note = NK77.46_CD70_DB03_C05 construct
MALPVTALLLPLALLLHAARPDYKDDDDKGGGGSGGGGSQVQLVQSGAEVKKPGASVKVSCKASGYTFTDYYIHWVRQAPGQGLEWMGMINPRGGSTTYAQSFQGRVTMTRDTSTSTVYMELSSLRSEDTAVYYCARDLGDYGDYDYWGQGTLVTVSSGGGGSGGGGSGGGGSDIQMTQSPSSLSASVGDRVTITCRASQSISTNLAWYQQKPGKAPKLLIYDASYLEAGVPSRFSGSGSGTDFTLTISSLQPEDFATYYCQQSYSTPPTFGQGTKLEIKTTTPAPRPPTPAPTIASQPLSLRPEACRPAAGGAVHTRGLDFACDIYIWAPLAGTCGVLLLSLVITLYCRRDQRLPPDAHKPPGGGSFRTPIQEEQADAHSTLAKIRVKFSRSADAPAYQQGQNQLYNELNLGRREEYDVLDKRRGRDPEMGGKPRRKNPQEGLYNELQKDKMAEAYSEIGMKGERRRGKGHDGLYQGLSTATKDTYDALHMQALPPRGSGEGRGSLLTCGDVEENPGPMALPVTALLLPLALLLHAARPNWVNVISDLKKIEDLIQSMHIDATLYTESDVHPSCKVTAMKCFLLELQVISLESGDASIHDTVENLIILANNSLSSNGNVTESGCKECEELEEKNIKEFLQSFVHIVQMFINTSTTTPAPRPPTPAPTIASQPLSLRPEACRPAAGGAVHTRGLDFACDIYIWAPLAGTCGVLLLSLVITLYC

SEQ ID NO: 355 - protein, 734 aa, synthetic construct
  REGION 1..734: note = NK77.47_CD70_DB03_D11 construct
MALPVTALLLPLALLLHAARPDYKDDDDKGGGGSGGGGSEVQLLESGGGLVQPGGSLRLSCAASGFTFSNSDMNWVRQAPGKGLEWVSAISGGGDTLYYADSVKGRFTISRDNSKNTLYLQMNSLRAEDTAVYYCAMASALDSSGDNEAFDIWGQGTTVTVSSGGGGSGGGGSGGGGSDIVMTQSPDSLAVSLGERATINCKSSQSVLYSSNNKNYLAWYQQKPGQPPKLLIYWASTRDSGVPDRFSGSGSGTDFTLTISSLQAEDVAVYYCQQYYGFPPTFGQGTRLEIKTTTPAPRPPTPAPTIASQPLSLRPEACRPAAGGAVHTRGLDFACDIYIWAPLAGTCGVLLLSLVITLYCRRDQRLPPDAHKPPGGGSFRTPIQEEQADAHSTLAKIRVKFSRSADAPAYQQGQNQLYNELNLGRREEYDVLDKRRGRDPEMGGKPRRKNPQEGLYNELQKDKMAEAYSEIGMKGERRRGKGHDGLYQGLSTATKDTYDALHMQALPPRGSGEGRGSLLTCGDVEENPGPMALPVTALLLPLALLLHAARPNWVNVISDLKKIEDLIQSMHIDATLYTESDVHPSCKVTAMKCFLLELQVISLESGDASIHDTVENLIILANNSLSSNGNVTESGCKECEELEEKNIKEFLQSFVHIVQMFINTSTTTPAPRPPTPAPTIASQPLSLRPEACRPAAGGAVHTRGLDFACDIYIWAPLAGTCGVLLLSLVITLYC

SEQ ID NO: 356 - protein, 726 aa, synthetic construct
  REGION 1..726: note = NK77.48_CD70_DB03_E01 construct
MALPVTALLLPLALLLHAARPDYKDDDDKGGGGSGGGGSQVQLVQSGAEVKKPGASVKVSCKASGYTFTSYYMHWVRQAPGQGLEWMGWINPNNGGTSYAQKFQGRVTMTRDTSTSTVYMELSSLRSEDTAVYYCARVEDDFWSGPSFDYWGQGTLVTVSSGGGGSGGGGSGGGGSDIQMTQSPSSLSASVGDRVTITCQASHDISKFLNWYQQKPGKAPKLLIYDASNLQRGVPSRFSGSGSGTDFTLTISSLQPEDFATYYCQQTYSFPFTFGQGTKLEIKTTTPAPRPPTPAPTIASQPLSLRPEACRPAAGGAVHTRGLDFACDIYIWAPLAGTCGVLLLSLVITLYCRRDQRLPPDAHKPPGGGSFRTPIQEEQADAHSTLAKIRVKFSRSADAPAYQQGQNQLYNELNLGRREEYDVLDKRRGRDPEMGGKPRRKNPQEGLYNELQKDKMAEAYSEIGMKGERRRGKGHDGLYQGLSTATKDTYDALHMQALPPRGSGEGRGSLLTCGDVEENPGPMALPVTALLLPLALLLHAARPNWVNVISDLKKIEDLIQSMHIDATLYTESDVHPSCKVTAMKCFLLELQVISLESGDASIHDTVENLIILANNSLSSNGNVTESGCKECEELEEKNIKEFLQSFVHIVQMFINTSTTTPAPRPPTPAPTIASQPLSLRPEACRPAAGGAVHTRGLDFACDIYIWAPLAGTCGVLLLSLVITLYC

SEQ ID NO: 357 - protein, 728 aa, synthetic construct
  REGION 1..728: note = NK77.49_CD70_DB03_E03 construct
MALPVTALLLPLALLLHAARPDYKDDDDKGGGGSGGGGSQVQLVQSGAEVKKPGSSVKVSCKASGGTFTNYAFSWVRQAPGQGLEWMGGIIPISGAANYAQKFQGRVTITADESTSTAYMELSSLRSEDTAVYYCARGSGLDDAFDIWGQGTMVTVSSGGGGSGGGGSGGGGSDIVMTQSPLSLPVTPGEPASISCRSSQSLLHSNGYNYLDWYLQKPGQSPQLLIYDASSLQSGVPDRFSGSGSGTDFTLKISRVEAEDVGVYYCMQARQTPLTFGQGTRLEIKTTTPAPRPPTPAPTIASQPLSLRPEACRPAAGGAVHTRGLDFACDIYIWAPLAGTCGVLLLSLVITLYCRRDQRLPPDAHKPPGGGSFRTPIQEEQADAHSTLAKIRVKFSRSADAPAYQQGQNQLYNELNLGRREEYDVLDKRRGRDPEMGGKPRRKNPQEGLYNELQKDKMAEAYSEIGMKGERRRGKGHDGLYQGLSTATKDTYDALHMQALPPRGSGEGRGSLLTCGDVEENPGPMALPVTALLLPLALLLHAARPNWVNVISDLKKIEDLIQSMHIDATLYTESDVHPSCKVTAMKCFLLELQVISLESGDASIHDTVENLIILANNSLSSNGNVTESGCKECEELEEKNIKEFLQSFVHIVQMFINTSTTTPAPRPPTPAPTIASQPLSLRPEACRPAAGGAVHTRGLDFACDIYIWAPLAGTCGVLLLSLVITLYC

SEQ ID NO: 358 - protein, 738 aa, synthetic construct
  REGION 1..738: note = NK77.50_CD70_DB03_E09 construct
MALPVTALLLPLALLLHAARPDYKDDDDKGGGGSGGGGSQVQLVQSGAEVKKPGASVKVSCKASGYTFTAYYMHWVRQAPGQGLEWMGWMNPNSGNTGYAQKFQGRVTMTRDTSTSTVYMELSSLRSEDTAVYYCAREGRIDYGDYDDYYYYYGMDVWGQGTTVTVSSGGGGSGGGGSGGGGSDIVMTQSPLSLPVTPGEPASISCRSSQSLLHSNGYNYLDWYLQKPGQSPQLLIYAASNLQGGVPDRFSGSGSGTDFTLKISRVEAEDVGVYYCMQTLESPVTFGGGTKVEIKTTTPAPRPPTPAPTIASQPLSLRPEACRPAAGGAVHTRGLDFACDIYIWAPLAGTCGVLLLSLVITLYCRRDQRLPPDAHKPPGGGSFRTPIQEEQADAHSTLAKIRVKFSRSADAPAYQQGQNQLYNELNLGRREEYDVLDKRRGRDPEMGGKPRRKNPQEGLYNELQKDKMAEAYSEIGMKGERRRGKGHDGLYQGLSTATKDTYDALHMQALPPRGSGEGRGSLLTCGDVEENPGPMALPVTALLLPLALLLHAARPNWVNVISDLKKIEDLIQSMHIDATLYTESDVHPSCKVTAMKCFLLELQVISLESGDASIHDTVENLIILANNSLSSNGNVTESGCKECEELEEKNIKEFLQSFVHIVQMFINTSTTTPAPRPPTPAPTIASQPLSLRPEACRPAAGGAVHTRGLDFACDIYIWAPLAGTCGVLLLSLVITLYC

SEQ ID NO: 359 - protein, 724 aa, synthetic construct
  REGION 1..724: note = NK77.51_CD70_DB03_F02 construct
MALPVTALLLPLALLLHAARPDYKDDDDKGGGGSGGGGSQVQLVQSGAEVKKPGASVKVSCKASGYTFTDYYVHWVRQAPGQGLEWMGTINPSGGSTSYAQKFQGRVTMTRDTSTSTVYMELSSLRSEDTAVYYCARDQGLWFTGFDYWGQGTLVTVSSGGGGSGGGGSGGGGSDIQMTQSPSSLSASVGDRVTITCRASQGISNNLNWYQQKPGKAPKLLIYDASNLERGVPSRFSGSGSGTDFTLTISSLQPEDFATYYCQQSYDGPITFGQGTRLEIKTTTPAPRPPTPAPTIASQPLSLRPEACRPAAGGAVHTRGLDFACDIYIWAPLAGTCGVLLLSLVITLYCRRDQRLPPDAHKPPGGGSFRTPIQEEQADAHSTLAKIRVKFSRSADAPAYQQGQNQLYNELNLGRREEYDVLDKRRGRDPEMGGKPRRKNPQEGLYNELQKDKMAEAYSEIGMKGERRRGKGHDGLYQGLSTATKDTYDALHMQALPPRGSGEGRGSLLTCGDVEENPGPMALPVTALLLPLALLLHAARPNWVNVISDLKKIEDLIQSMHIDATLYTESDVHPSCKVTAMKCFLLELQVISLESGDASIHDTVENLIILANNSLSSNGNVTESGCKECEELEEKNIKEFLQSFVHIVQMFINTSTTTPAPRPPTPAPTIASQPLSLRPEACRPAAGGAVHTRGLDFACDIYIWAPLAGTCGVLLLSLVITLYC

SEQ ID NO: 360 - protein, 724 aa, synthetic construct
  REGION 1..724: note = NK77.52_CD70_DB03_F05 construct
MALPVTALLLPLALLLHAARPDYKDDDDKGGGGSGGGGSQVQLVQSGAEVKKPGASVKVSCKASGYTFTAYHMHWVRQAPGQGLEWMGIINPGDGATGYAQNLQGRVTMTRDTSTSTVYMELSSLRSEDTAVYYCAGEGISGSDAFDIWGQGTLVTVSSGGGGSGGGGSGGGGSDIQMTQSPSSLSASVGDRVTITCRASQSISSWLAWYQQKPGKAPKLLIYAASSLQSGVPSRFSGSGSGTDFTLTISSLQPEDFATYYCLQDYSYPLTFGGGTKVEIKTTTPAPRPPTPAPTIASQPLSLRPEACRPAAGGAVHTRGLDFACDIYIWAPLAGTCGVLLLSLVITLYCRRDQRLPPDAHKPPGGGSFRTPIQEEQADAHSTLAKIRVKFSRSADAPAYQQGQNQLYNELNLGRREEYDVLDKRRGRDPEMGGKPRRKNPQEGLYNELQKDKMAEAYSEIGMKGERRRGKGHDGLYQGLSTATKDTYDALHMQALPPRGSGEGRGSLLTCGDVEENPGPMALPVTALLLPLALLLHAARPNWVNVISDLKKIEDLIQSMHIDATLYTESDVHPSCKVTAMKCFLLELQVISLESGDASIHDTVENLIILANNSLSSNGNVTESGCKECEELEEKNIKEFLQSFVHIVQMFINTSTTTPAPRPPTPAPTIASQPLSLRPEACRPAAGGAVHTRGLDFACDIYIWAPLAGTCGVLLLSLVITLYC

SEQ ID NO: 361 - protein, 722 aa, synthetic construct
  REGION 1..722: note = NK77.53_CD70_DB03_F06 construct
MALPVTALLLPLALLLHAARPDYKDDDDKGGGGSGGGGSQVQLVQSGAEVKKPGSSVKVSCKASGGTFSSYAISWVRQAPGQGLEWMGWMNPNSGNTGYAQKFQGRVTITADESTSTAYMELSSLRSEDTAVYYCAWGVDPYYFDYWGQGTLVTVSSGGGGSGGGGSGGGGSDIQMTQSPSSLSASVGDRVTITCRASQSINRWLAWYQQKPGKAPKLLIYDASNLETGVPSRFSGSGSGTDFTLTISSLQPEDFATYYCQQSYITPLTFGGGTKVEIKTTTPAPRPPTPAPTIASQPLSLRPEACRPAAGGAVHTRGLDFACDIYIWAPLAGTCGVLLLSLVITLYCRRDQRLPPDAHKPPGGGSFRTPIQEEQADAHSTLAKIRVKFSRSADAPAYQQGQNQLYNELNLGRREEYDVLDKRRGRDPEMGGKPRRKNPQEGLYNELQKDKMAEAYSEIGMKGERRRGKGHDGLYQGLSTATKDTYDALHMQALPPRGSGEGRGSLLTCGDVEENPGPMALPVTALLLPLALLLHAARPNWVNVISDLKKIEDLIQSMHIDATLYTESDVHPSCKVTAMKCFLLELQVISLESGDASIHDTVENLIILANNSLSSNGNVTESGCKECEELEEKNIKEFLQSFVHIVQMFINTSTTTPAPRPPTPAPTIASQPLSLRPEACRPAAGGAVHTRGLDFACDIYIWAPLAGTCGVLLLSLVITLYC

SEQ ID NO: 362 - protein, 722 aa, synthetic construct
  REGION 1..722: note = NK77.54_CD70_DB03_F09 construct
MALPVTALLLPLALLLHAARPDYKDDDDKGGGGSGGGGSQVQLVQSGAEVKKPGASVKVSCKASGYTFTSYYMHWVRQAPGQGLEWMGIFNPSDGSTSYAQKFQGRVTMTRDTSTSTVYMELSSLRSEDTAVYYCARDVGETTFDPWGQGTLVTVSSGGGGSGGGGSGGGGSDIQMTQSPSSLSASVGDRVTITCQASQDISNYLNWYQQKPGKAPKLLIYDASSLESGVPSRFSGSGSGTDFTLTISSLQPEDFATYYCQQTNSFPITFGQGTRLEIKTTTPAPRPPTPAPTIASQPLSLRPEACRPAAGGAVHTRGLDFACDIYIWAPLAGTCGVLLLSLVITLYCRRDQRLPPDAHKPPGGGSFRTPIQEEQADAHSTLAKIRVKFSRSADAPAYQQGQNQLYNELNLGRREEYDVLDKRRGRDPEMGGKPRRKNPQEGLYNELQKDKMAEAYSEIGMKGERRRGKGHDGLYQGLSTATKDTYDALHMQALPPRGSGEGRGSLLTCGDVEENPGPMALPVTALLLPLALLLHAARPNWVNVISDLKKIEDLIQSMHIDATLYTESDVHPSCKVTAMKCFLLELQVISLESGDASIHDTVENLIILANNSLSSNGNVTESGCKECEELEEKNIKEFLQSFVHIVQMFINTSTTTPAPRPPTPAPTIASQPLSLRPEACRPAAGGAVHTRGLDFACDIYIWAPLAGTCGVLLLSLVITLYC

SEQ ID NO: 363 - protein, 727 aa, synthetic construct
  REGION 1..727: note = NK77.55_CD70_DB03_F12 construct
MALPVTALLLPLALLLHAARPDYKDDDDKGGGGSGGGGSQVQLVQSGAEVKKPGASVKVSCKASGYTFTSYGISWVRQAPGQGLEWMGWISAYNGHTNYAQKFQGRVTMTRDTSTSTVYMELSSLRSEDTAVYYCARDSVRGWDYYYGMGVWGQGTTVTVSSGGGGSGGGGSGGGGSDIQMTQSPSSLSASVGDRVTITCQASQDIRNFLNWYQQKPGKAPKLLIYAASTLQSGVPSRFSGSGSGTDFTLTISSLQPEDFATYYCQQSYSAPSTFGQGTKLEIKTTTPAPRPPTPAPTIASQPLSLRPEACRPAAGGAVHTRGLDFACDIYIWAPLAGTCGVLLLSLVITLYCRRDQRLPPDAHKPPGGGSFRTPIQEEQADAHSTLAKIRVKFSRSADAPAYQQGQNQLYNELNLGRREEYDVLDKRRGRDPEMGGKPRRKNPQEGLYNELQKDKMAEAYSEIGMKGERRRGKGHDGLYQGLSTATKDTYDALHMQALPPRGSGEGRGSLLTCGDVEENPGPMALPVTALLLPLALLLHAARPNWVNVISDLKKIEDLIQSMHIDATLYTESDVHPSCKVTAMKCFLLELQVISLESGDASIHDTVENLIILANNSLSSNGNVTESGCKECEELEEKNIKEFLQSFVHIVQMFINTSTTTPAPRPPTPAPTIASQPLSLRPEACRPAAGGAVHTRGLDFACDIYIWAPLAGTCGVLLLSLVITLYC

SEQ ID NO: 364 - protein, 724 aa, synthetic construct
  REGION 1..724: note = NK77.56_CD70_DB03_G06 construct
MALPVTALLLPLALLLHAARPDYKDDDDKGGGGSGGGGSQVQLVQSGAEVKKPGSSVKVSCKASGYTFIDYYMHWVRQAPGQGLEWMGWMNPHSGNSDNAPKFQGRVTITADESTSTAYMELSSLRSEDTAVYYCARGYSGYDLTADYWGQGTLVTVSSGGGGSGGGGSGGGGSDIQMTQSPSSLSASVGDRVTITCRASQSISNYLNWYQQKPGKAPKLLIYDASNLETGVPSRFSGSGSGTDFTLTISSLQPEDFATYYCQQSYSTPITFGQGTRLEIKTTTPAPRPPTPAPTIASQPLSLRPEACRPAAGGAVHTRGLDFACDIYIWAPLAGTCGVLLLSLVITLYCRRDQRLPPDAHKPPGGGSFRTPIQEEQADAHSTLAKIRVKFSRSADAPAYQQGQNQLYNELNLGRREEYDVLDKRRGRDPEMGGKPRRKNPQEGLYNELQKDKMAEAYSEIGMKGERRRGKGHDGLYQGLSTATKDTYDALHMQALPPRGSGEGRGSLLTCGDVEENPGPMALPVTALLLPLALLLHAARPNWVNVISDLKKIEDLIQSMHIDATLYTESDVHPSCKVTAMKCFLLELQVISLESGDASIHDTVENLIILANNSLSSNGNVTESGCKECEELEEKNIKEFLQSFVHIVQMFINTSTTTPAPRPPTPAPTIASQPLSLRPEACRPAAGGAVHTRGLDFACDIYIWAPLAGTCGVLLLSLVITLYC

SEQ ID NO: 365 - protein, 733 aa, synthetic construct
  REGION 1..733: note = NK77.57_CD70_DB03_G11 construct
MALPVTALLLPLALLLHAARPDYKDDDDKGGGGSGGGGSQVQLVQSGAEVKKPGASVKVSCKASGYTFTGQYMHWVRQAPGQGLEWMGWINPNTGDTNYAQKFQGRVTMTRDTSTSTVYMELSSLRSEDTAVYYCARDSVFEVEGGTDYYYYYGMDVWGQGTMVTVSSGGGGSGGGGSGGGGSDIQMTQSPSSLSASVGDRVTITCRASETISGWLAWYQQKPGKAPKLLIYDASNLETGVPSRFSGSGSGTDFTLTISSLQPEDFATYYCQQSYSTPWTFGQGTKLEIKTTTPAPRPPTPAPTIASQPLSLRPEACRPAAGGAVHTRGLDFACDIYIWAPLAGTCGVLLLSLVITLYCRRDQRLPPDAHKPPGGGSFRTPIQEEQADAHSTLAKIRVKFSRSADAPAYQQGQNQLYNELNLGRREEYDVLDKRRGRDPEMGGKPRRKNPQEGLYNELQKDKMAEAYSEIGMKGERRRGKGHDGLYQGLSTATKDTYDALHMQALPPRGSGEGRGSLLTCGDVEENPGPMALPVTALLLPLALLLHAARPNWVNVISDLKKIEDLIQSMHIDATLYTESDVHPSCKVTAMKCFLLELQVISLESGDASIHDTVENLIILANNSLSSNGNVTESGCKECEELEEKNIKEFLQSFVHIVQMFINTSTTTPAPRPPTPAPTIASQPLSLRPEACRPAAGGAVHTRGLDFACDIYIWAPLAGTCGVLLLSLVITLYC

SEQ ID NO: 366 - protein, 723 aa, synthetic construct
  REGION 1..723: note = NK77.58_CD70_DB03_H08 construct
MALPVTALLLPLALLLHAARPDYKDDDDKGGGGSGGGGSQVQLVQSGAEVKKPGASVKVSCKASGYTFTSYDINWVRQAPGQGLEWMGVINPSGGGTSYAQKFQGRVTMTRDTSTSTVYMELSSLRSEDTAVYYCARYSGYDWVFDYWGQGTLVTVSSGGGGSGGGGSGGGGSDIQMTQSPSSLSASVGDRVTITCRASQGIGSWLAWYQQKPGKAPKLLIYAASTLQSGVPSRFSGSGSGTDFTLTISSLQPEDFATYYCQQSYSTPWTFGPGTKVDIKTTTPAPRPPTPAPTIASQPLSLRPEACRPAAGGAVHTRGLDFACDIYIWAPLAGTCGVLLLSLVITLYCRRDQRLPPDAHKPPGGGSFRTPIQEEQADAHSTLAKIRVKFSRSADAPAYQQGQNQLYNELNLGRREEYDVLDKRRGRDPEMGGKPRRKNPQEGLYNELQKDKMAEAYSEIGMKGERRRGKGHDGLYQGLSTATKDTYDALHMQALPPRGSGEGRGSLLTCGDVEENPGPMALPVTALLLPLALLLHAARPNWVNVISDLKKIEDLIQSMHIDATLYTESDVHPSCKVTAMKCFLLELQVISLESGDASIHDTVENLIILANNSLSSNGNVTESGCKECEELEEKNIKEFLQSFVHIVQMFINTSTTTPAPRPPTPAPTIASQPLSLRPEACRPAAGGAVHTRGLDFACDIYIWAPLAGTCGVLLLSLVITLYC

SEQ ID NO: 367 - protein, 724 aa, synthetic construct
  REGION 1..724: note = NK77.59_CD70_DB03_H10 construct
MALPVTALLLPLALLLHAARPDYKDDDDKGGGGSGGGGSQVQLVQSGAEVKKPGASVKVSCKASGYTFANYYMHWVRQAPGQGLEWMGIINPSGGSTSYAQKFQGRVTMTRDTSTSTVYMELSSLRSEDTAVYYCARDSGSYFGWFDPWGQGTLVTVSSGGGGSGGGGSGGGGSDIQMTQSPSSLSASVGDRVTITCRASQSISSSLAWYQQKPGKAPKLLIYDASSLQSGVPSRFSGSGSGTDFTLTISSLQPEDFATYYCQQSYNTPPTFGGGTKLEIKTTTPAPRPPTPAPTIASQPLSLRPEACRPAAGGAVHTRGLDFACDIYIWAPLAGTCGVLLLSLVITLYCRRDQRLPPDAHKPPGGGSFRTPIQEEQADAHSTLAKIRVKFSRSADAPAYQQGQNQLYNELNLGRREEYDVLDKRRGRDPEMGGKPRRKNPQEGLYNELQKDKMAEAYSEIGMKGERRRGKGHDGLYQGLSTATKDTYDALHMQALPPRGSGEGRGSLLTCGDVEENPGPMALPVTALLLPLALLLHAARPNWVNVISDLKKIEDLIQSMHIDATLYTESDVHPSCKVTAMKCFLLELQVISLESGDASIHDTVENLIILANNSLSSNGNVTESGCKECEELEEKNIKEFLQSFVHIVQMFINTSTTTPAPRPPTPAPTIASQPLSLRPEACRPAAGGAVHTRGLDFACDIYIWAPLAGTCGVLLLSLVITLYC

SEQ ID NO: 368 - protein, 724 aa, synthetic construct
  REGION 1..724: note = NK77.60_CD70_DB04_A05 construct
MALPVTALLLPLALLLHAARPDYKDDDDKGGGGSGGGGSQVQLVQSGAEVKKPGASVKVSCKASGYTFTTYYMHWVRQAPGQGLEWMGIINPTGGSTYYAQKFQGRVTMTRDTSTSTVYMELSSLRSEDTAVYYCARDSGNYQGIFDYWGQGTLVTVSSGGGGSGGGGSGGGGSDIQMTQSPSSLSASVGDRVTITCRASQGIGGYLAWYQQKPGKAPKLLIYDASNLETGVPSRFSGSGSGTDFTLTISSLQPEDFATYYCQQSYDSPPTFGQGTRLEIKTTTPAPRPPTPAPTIASQPLSLRPEACRPAAGGAVHTRGLDFACDIYIWAPLAGTCGVLLLSLVITLYCRRDQRLPPDAHKPPGGGSFRTPIQEEQADAHSTLAKIRVKFSRSADAPAYQQGQNQLYNELNLGRREEYDVLDKRRGRDPEMGGKPRRKNPQEGLYNELQKDKMAEAYSEIGMKGERRRGKGHDGLYQGLSTATKDTYDALHMQALPPRGSGEGRGSLLTCGDVEENPGPMALPVTALLLPLALLLHAARPNWVNVISDLKKIEDLIQSMHIDATLYTESDVHPSCKVTAMKCFLLELQVISLESGDASIHDTVENLIILANNSLSSNGNVTESGCKECEELEEKNIKEFLQSFVHIVQMFINTSTTTPAPRPPTPAPTIASQPLSLRPEACRPAAGGAVHTRGLDFACDIYIWAPLAGTCGVLLLSLVITLYC

SEQ ID NO: 369 - protein, 723 aa, synthetic construct
  REGION 1..723: note = NK77.61_CD70_DB04_A07 construct
MALPVTALLLPLALLLHAARPDYKDDDDKGGGGSGGGGSQVQLVQSGAEVKKPGASVKVSCKASGNTFTSYYMHWVRQAPGQGLEWMGWINPNSGDTNYAQNFQGRVTMTRDTSTSTVYMELSSLRSEDTAVYYCARGVSGYDLFDYWGQGTLVTVSSGGGGSGGGGSGGGGSDIQMTQSPSSLSASVGDRVTITCRASQSVSSYLNWYQQKPGKAPKLLIYDTSNLETGVPSRFSGSGSGTDFTLTISSLQPEDFATYYCQQAHSFPLTFGGGTKVEIKTTTPAPRPPTPAPTIASQPLSLRPEACRPAAGGAVHTRGLDFACDIYIWAPLAGTCGVLLLSLVITLYCRRDQRLPPDAHKPPGGGSFRTPIQEEQADAHSTLAKIRVKFSRSADAPAYQQGQNQLYNELNLGRREEYDVLDKRRGRDPEMGGKPRRKNPQEGLYNELQKDKMAEAYSEIGMKGERRRGKGHDGLYQGLSTATKDTYDALHMQALPPRGSGEGRGSLLTCGDVEENPGPMALPVTALLLPLALLLHAARPNWVNVISDLKKIEDLIQSMHIDATLYTESDVHPSCKVTAMKCFLLELQVISLESGDASIHDTVENLIILANNSLSSNGNVTESGCKECEELEEKNIKEFLQSFVHIVQMFINTSTTTPAPRPPTPAPTIASQPLSLRPEACRPAAGGAVHTRGLDFACDIYIWAPLAGTCGVLLLSLVITLYC

SEQ ID NO: 370 - protein, 723 aa, synthetic construct
  REGION 1..723: note = NK77.62_CD70_DB04_A10 construct
MALPVTALLLPLALLLHAARPDYKDDDDKGGGGSGGGGSEVQLVESGGGLVKPGGSLRLSCAASGFTFSSYGMHWVRQAPGKGLEWVASIKHDGSEQYYVDSVKGRFTISRDDSKNTLYLQMNSLKTEDTAVYYCAASGVDVWGQGTTVTVSSGGGGSGGGGSGGGGSDIVMTQSPLSLPVTPGEPASISCRSSQSLLHSNGYNYLDWYLQKPGQSPQLLIYLGSTRASGVPDRFSGSGSGTDFTLKISRVEAEDVGVYYCMQALDTPLTFGGGTKLEIKTTTPAPRPPTPAPTIASQPLSLRPEACRPAAGGAVHTRGLDFACDIYIWAPLAGTCGVLLLSLVITLYCRRDQRLPPDAHKPPGGGSFRTPIQEEQADAHSTLAKIRVKFSRSADAPAYQQGQNQLYNELNLGRREEYDVLDKRRGRDPEMGGKPRRKNPQEGLYNELQKDKMAEAYSEIGMKGERRRGKGHDGLYQGLSTATKDTYDALHMQALPPRGSGEGRGSLLTCGDVEENPGPMALPVTALLLPLALLLHAARPNWVNVISDLKKIEDLIQSMHIDATLYTESDVHPSCKVTAMKCFLLELQVISLESGDASIHDTVENLIILANNSLSSNGNVTESGCKECEELEEKNIKEFLQSFVHIVQMFINTSTTTPAPRPPTPAPTIASQPLSLRPEACRPAAGGAVHTRGLDFACDIYIWAPLAGTCGVLLLSLVITLYC

SEQ ID NO: 371 - protein, 726 aa, synthetic construct
  REGION 1..726: note = NK77.63_CD70_DB04_A11 construct
MALPVTALLLPLALLLHAARPDYKDDDDKGGGGSGGGGSQVQLVQSGAEVKKPGASVKVSCKASGGTFSRYDINWVRQAPGQGLEWVGIIDPTGASTSYAQKFQGRVTMTRDTSTSTVYMELSSLRSEDTAVYYCARDYSYGMDYYGMDVWGQGTLVTVSSGGGGSGGGGSGGGGSDIQMTQSPSSLSASVGDRVTITCQASQDISNYLNWYQQKPGKAPKLLIYDTSNLQTGVPSRFSGSGSGTDFTLTISSLQPEDFATYYLSTDLQTTAHFGQGTKVEIKTTTPAPRPPTPAPTIASQPLSLRPEACRPAAGGAVHTRGLDFACDIYIWAPLAGTCGVLLLSLVITLYCRRDQRLPPDAHKPPGGGSFRTPIQEEQADAHSTLAKIRVKFSRSADAPAYQQGQNQLYNELNLGRREEYDVLDKRRGRDPEMGGKPRRKNPQEGLYNELQKDKMAEAYSEIGMKGERRRGKGHDGLYQGLSTATKDTYDALHMQALPPRGSGEGRGSLLTCGDVEENPGPMALPVTALLLPLALLLHAARPNWVNVISDLKKIEDLIQSMHIDATLYTESDVHPSCKVTAMKCFLLELQVISLESGDASIHDTVENLIILANNSLSSNGNVTESGCKECEELEEKNIKEFLQSFVHIVQMFINTSTTTPAPRPPTPAPTIASQPLSLRPEACRPAAGGAVHTRGLDFACDIYIWAPLAGTCGVLLLSLVITLYC

SEQ ID NO: 372 - protein, 728 aa, synthetic construct
  REGION 1..728: note = NK77.64_CD70_DB04_B03 construct
MALPVTALLLPLALLLHAARPDYKDDDDKGGGGSGGGGSQVQLVQSGAEVKKPGSSVKVSCKASGYTFTSYGISWVRQAPGQGLEWMGGIIPIFGTTNYAQKFQGRVTITADESTSTAYMELSSLRSEDTAVYYCARDHSGDGYFDLWGRGTLVTVSSGGGGSGGGGSGGGGSDIVMTQSPLSLPVTPGEPASISCRSSQSLLHSNGYNYLDWYLQKPGQSPQLLIYDASSLQSGVPDRFSGSGSGTDFTLKISRVEAEDVGVYYCMQGTHWPPTFGQGTKVEIKTTTPAPRPPTPAPTIASQPLSLRPEACRPAAGGAVHTRGLDFACDIYIWAPLAGTCGVLLLSLVITLYCRRDQRLPPDAHKPPGGGSFRTPIQEEQADAHSTLAKIRVKFSRSADAPAYQQGQNQLYNELNLGRREEYDVLDKRRGRDPEMGGKPRRKNPQEGLYNELQKDKMAEAYSEIGMKGERRRGKGHDGLYQGLSTATKDTYDALHMQALPPRGSGEGRGSLLTCGDVEENPGPMALPVTALLLPLALLLHAARPNWVNVISDLKKIEDLIQSMHIDATLYTESDVHPSCKVTAMKCFLLELQVISLESGDASIHDTVENLIILANNSLSSNGNVTESGCKECEELEEKNIKEFLQSFVHIVQMFINTSTTTPAPRPPTPAPTIASQPLSLRPEACRPAAGGAVHTRGLDFACDIYIWAPLAGTCGVLLLSLVITLYC

SEQ ID NO: 373 - protein, 722 aa, synthetic construct
  REGION 1..722: note = NK77.65_CD70_DB04_B05 construct
MALPVTALLLPLALLLHAARPDYKDDDDKGGGGSGGGGSQVQLVQSGAEVKKPGASVKVSCKASGYTFTENEMHWVRQAPGQGLEWMGWINPNSGGTNYAQKFQGRVTMTRDTSTSTVYMELSSLRSEDTAVYYCAGSWGGYYFDYWGQGTLVTVSSGGGGSGGGGSGGGGSDIQMTQSPSSLSASVGDRVTITCRASQSVSRYLNWYQQKPGKAPKLLIYDASNLETGVPSRFSGSGSGTDFTLTISSLQPEDFATYYCQQADSFPVTFGQGTKLEIKTTTPAPRPPTPAPTIASQPLSLRPEACRPAAGGAVHTRGLDFACDIYIWAPLAGTCGVLLLSLVITLYCRRDQRLPPDAHKPPGGGSFRTPIQEEQADAHSTLAKIRVKFSRSADAPAYQQGQNQLYNELNLGRREEYDVLDKRRGRDPEMGGKPRRKNPQEGLYNELQKDKMAEAYSEIGMKGERRRGKGHDGLYQGLSTATKDTYDALHMQALPPRGSGEGRGSLLTCGDVEENPGPMALPVTALLLPLALLLHAARPNWVNVISDLKKIEDLIQSMHIDATLYTESDVHPSCKVTAMKCFLLELQVISLESGDASIHDTVENLIILANNSLSSNGNVTESGCKECEELEEKNIKEFLQSFVHIVQMFINTSTTTPAPRPPTPAPTIASQPLSLRPEACRPAAGGAVHTRGLDFACDIYIWAPLAGTCGVLLLSLVITLYC

SEQ ID NO: 374 - protein, 725 aa, synthetic construct
  REGION 1..725: note = NK77.66_CD70_DB04_B07 construct
MALPVTALLLPLALLLHAARPDYKDDDDKGGGGSGGGGSQVQLVQSGAEVKKPGASVKVSCKASGYTFTNYYIYWVRQAPGQGLEWMGWINPNDGATNYAQKFQGRVTMTRDTSTSTVYMELSSLRSEDTAVYYCAREGNDYYYYFMDYWGQGTLVTVSSGGGGSGGGGSGGGGSDIQMTQSPSSLSASVGDRVTITCRASQGISNNLNWYQQKPGKAPKLLIYHASNLETGVPSRFSGSGSGTDFTLTISSLQPEDFATYYCQQSYDGPMTFGQGTKLEIKTTTPAPRPPTPAPTIASQPLSLRPEACRPAAGGAVHTRGLDFACDIYIWAPLAGTCGVLLLSLVITLYCRRDQRLPPDAHKPPGGGSFRTPIQEEQADAHSTLAKIRVKFSRSADAPAYQQGQNQLYNELNLGRREEYDVLDKRRGRDPEMGGKPRRKNPQEGLYNELQKDKMAEAYSEIGMKGERRRGKGHDGLYQGLSTATKDTYDALHMQALPPRGSGEGRGSLLTCGDVEENPGPMALPVTALLLPLALLLHAARPNWVNVISDLKKIEDLIQSMHIDATLYTESDVHPSCKVTAMKCFLLELQVISLESGDASIHDTVENLIILANNSLSSNGNVTESGCKECEELEEKNIKEFLQSFVHIVQMFINTSTTTPAPRPPTPAPTIASQPLSLRPEACRPAAGGAVHTRGLDFACDIYIWAPLAGTCGVLLLSLVITLYC

SEQ ID NO: 375 - protein, 731 aa, synthetic construct
  REGION 1..731: note = NK77.67_CD70_DB04_C01 construct
MALPVTALLLPLALLLHAARPDYKDDDDKGGGGSGGGGSQVQLVQSGAEVKKPGSSVKVSCKASGGTFSSYAISWVRQAPGQGLEWMGGITPMFGTTDYAQKFQGRVTITADESTSTAYMELSSLRSEDTAVYYCARDERDGYATVAFDIWGQGTMVTVSSGGGGSGGGGSGGGGSDIVMTQSPLSLPVTPGEPASISCRSSQSLLHSNGYNYLDWYLQKPGQSPQLLIYDASNLETGVPDRFSGSGSGTDFTLKISRVEAEDVGVYYCMQGTHWPPTFGQGTKVEIKTTTPAPRPPTPAPTIASQPLSLRPEACRPAAGGAVHTRGLDFACDIYIWAPLAGTCGVLLLSLVITLYCRRDQRLPPDAHKPPGGGSFRTPIQEEQADAHSTLAKIRVKFSRSADAPAYQQGQNQLYNELNLGRREEYDVLDKRRGRDPEMGGKPRRKNPQEGLYNELQKDKMAEAYSEIGMKGERRRGKGHDGLYQGLSTATKDTYDALHMQALPPRGSGEGRGSLLTCGDVEENPGPMALPVTALLLPLALLLHAARPNWVNVISDLKKIEDLIQSMHIDATLYTESDVHPSCKVTAMKCFLLELQVISLESGDASIHDTVENLIILANNSLSSNGNVTESGCKECEELEEKNIKEFLQSFVHIVQMFINTSTTTPAPRPPTPAPTIASQPLSLRPEACRPAAGGAVHTRGLDFACDIYIWAPLAGTCGVLLLSLVITLYC

SEQ ID NO: 376 - protein, 726 aa, synthetic construct
  REGION 1..726: note = NK77.68_CD70_DB04_C04 construct
MALPVTALLLPLALLLHAARPDYKDDDDKGGGGSGGGGSQVQLVQSGAEVKKPGASVKVSCKASGYTFTSYYMHWVRQAPGQGLEWMGIINPSDGGTSYADKFQGRVTMTRDTSTSTVYMELSSLRSEDTAVYYCARALAPLGWGDGMDVWGQGTTVTVSSGGGGSGGGGSGGGGSDIQMTQSPSSLSASVGDRVTITCQASQDISNYLNWYQQKPGKAPKLLIYDASNLETGVPSRFSGSGSGTDFTLTISSLQPEDFATYYCQQSYDGPITFGQGTRLEIKTTTPAPRPPTPAPTIASQPLSLRPEACRPAAGGAVHTRGLDFACDIYIWAPLAGTCGVLLLSLVITLYCRRDQRLPPDAHKPPGGGSFRTPIQEEQADAHSTLAKIRVKFSRSADAPAYQQGQNQLYNELNLGRREEYDVLDKRRGRDPEMGGKPRRKNPQEGLYNELQKDKMAEAYSEIGMKGERRRGKGHDGLYQGLSTATKDTYDALHMQALPPRGSGEGRGSLLTCGDVEENPGPMALPVTALLLPLALLLHAARPNWVNVISDLKKIEDLIQSMHIDATLYTESDVHPSCKVTAMKCFLLELQVISLESGDASIHDTVENLIILANNSLSSNGNVTESGCKECEELEEKNIKEFLQSFVHIVQMFINTSTTTPAPRPPTPAPTIASQPLSLRPEACRPAAGGAVHTRGLDFACDIYIWAPLAGTCGVLLLSLVITLYC

SEQ ID NO: 377 - protein, 723 aa, synthetic construct
  REGION 1..723: note = NK77.69_CD70_DB04_C06 construct
MALPVTALLLPLALLLHAARPDYKDDDDKGGGGSGGGGSQVQLVQSGAEVKKPGSSVKVSCKASGYTFTSYYIHWVRQAPGQGLEWMGWMNPSSGVTNFAQKFQGRVTITADESTSTAYMELSSLRSEDTAVYYCARGSDQGDWSDPWGQGTLVTVSSGGGGSGGGGSGGGGSDIQMTQSPSSLSASVGDRVTITCRASQSISSYLNWYQQKPGKAPKLLIYDASNLETGVPSRFSGSGSGTDFTLTISSLQPEDFATYYCQQSYNTPPTFGGGTKVEIKTTTPAPRPPTPAPTIASQPLSLRPEACRPAAGGAVHTRGLDFACDIYIWAPLAGTCGVLLLSLVITLYCRRDQRLPPDAHKPPGGGSFRTPIQEEQADAHSTLAKIRVKFSRSADAPAYQQGQNQLYNELNLGRREEYDVLDKRRGRDPEMGGKPRRKNPQEGLYNELQKDKMAEAYSEIGMKGERRRGKGHDGLYQGLSTATKDTYDALHMQALPPRGSGEGRGSLLTCGDVEENPGPMALPVTALLLPLALLLHAARPNWVNVISDLKKIEDLIQSMHIDATLYTESDVHPSCKVTAMKCFLLELQVISLESGDASIHDTVENLIILANNSLSSNGNVTESGCKECEELEEKNIKEFLQSFVHIVQMFINTSTTTPAPRPPTPAPTIASQPLSLRPEACRPAAGGAVHTRGLDFACDIYIWAPLAGTCGVLLLSLVITLYC

SEQ ID NO: 378 - protein, 726 aa, synthetic construct
  REGION 1..726: note = NK77.70_CD70_DB04_C07 construct
MALPVTALLLPLALLLHAARPDYKDDDDKGGGGSGGGGSQVQLVQSGAEVKKPGASVKVSCKASGYTFTDSYIHWVRQAPGQGLEWIGWMNPNTGDTGYAQKFQGRVTMTRDTSTSTVYMELSSLRSEDTAVYYCAKDDFGELAPATFDPWGQGTLVTVSSGGGGSGGGGSGGGGSDIQMTQSPSSLSASVGDRVTITCQASQDISNYLNWYQQKPGKAPKLLIYGASSLQSGVPSRFSGSGSGTDFTLTISSLQPEDFATYYCLQDAATPITFGQGTRLEIKTTTPAPRPPTPAPTIASQPLSLRPEACRPAAGGAVHTRGLDFACDIYIWAPLAGTCGVLLLSLVITLYCRRDQRLPPDAHKPPGGGSFRTPIQEEQADAHSTLAKIRVKFSRSADAPAYQQGQNQLYNELNLGRREEYDVLDKRRGRDPEMGGKPRRKNPQEGLYNELQKDKMAEAYSEIGMKGERRRGKGHDGLYQGLSTATKDTYDALHMQALPPRGSGEGRGSLLTCGDVEENPGPMALPVTALLLPLALLLHAARPNWVNVISDLKKIEDLIQSMHIDATLYTESDVHPSCKVTAMKCFLLELQVISLESGDASIHDTVENLIILANNSLSSNGNVTESGCKECEELEEKNIKEFLQSFVHIVQMFINTSTTTPAPRPPTPAPTIASQPLSLRPEACRPAAGGAVHTRGLDFACDIYIWAPLAGTCGVLLLSLVITLYC

SEQ ID NO: 379 - protein, 726 aa, synthetic construct
  REGION 1..726: note = NK77.71_CD70_DB04_D02 construct
MALPVTALLLPLALLLHAARPDYKDDDDKGGGGSGGGGSQVQLVQSGAEVKKPGASVKVSCKASGYTFTSYDINWVRQAPGQGLEWMGVISPSGGGTSYAQKFQGRVTMTRDTSTSTVYMELSSLRSEDTAVYYCARYYGGNPEGWYFDLWGRGTLVTVSSGGGGSGGGGSGGGGSDIQMTQSPSSLSASVGDRVTITCRASQSIGNWLAWYQQKPGKAPKLLIYDASDLETGVPSRFSGSGSGTDFTLTISSLQPEDFATYYCQQSYTTPWTFGQGTKVEIKTTTPAPRPPTPAPTIASQPLSLRPEACRPAAGGAVHTRGLDFACDIYIWAPLAGTCGVLLLSLVITLYCRRDQRLPPDAHKPPGGGSFRTPIQEEQADAHSTLAKIRVKFSRSADAPAYQQGQNQLYNELNLGRREEYDVLDKRRGRDPEMGGKPRRKNPQEGLYNELQKDKMAEAYSEIGMKGERRRGKGHDGLYQGLSTATKDTYDALHMQALPPRGSGEGRGSLLTCGDVEENPGPMALPVTALLLPLALLLHAARPNWVNVISDLKKIEDLIQSMHIDATLYTESDVHPSCKVTAMKCFLLELQVISLESGDASIHDTVENLIILANNSLSSNGNVTESGCKECEELEEKNIKEFLQSFVHIVQMFINTSTTTPAPRPPTPAPTIASQPLSLRPEACRPAAGGAVHTRGLDFACDIYIWAPLAGTCGVLLLSLVITLYC

SEQ ID NO: 380 - protein, 741 aa, synthetic construct
  REGION 1..741: note = NK77.72_CD70_DB04_D05 construct
MALPVTALLLPLALLLHAARPDYKDDDDKGGGGSGGGGSEVQLLESGGGLVQPGGSLRLSCAASGFVFDDYAIHWVRQAPGKGLEWVAAISYDGSNKYYADSVKGRFTISRDNSKNTLYLQMNSLRAEDTAVYYCARAPQYYGSGTDPLEVRYYYYGMDVWGQGTTVTVSSGGGGSGGGGSGGGGSDIVMTQSPLSLPVTPGEPASISCRSSQSLLHSNGYNYLDWYLQKPGQSPQLLIYEVSNRASGVPDRFSGSGSGTDFTLKISRVEAEDVGVYYCMKGLQTPLTFGPGTKVDIKTTTPAPRPPTPAPTIASQPLSLRPEACRPAAGGAVHTRGLDFACDIYIWAPLAGTCGVLLLSLVITLYCRRDQRLPPDAHKPPGGGSFRTPIQEEQADAHSTLAKIRVKFSRSADAPAYQQGQNQLYNELNLGRREEYDVLDKRRGRDPEMGGKPRRKNPQEGLYNELQKDKMAEAYSEIGMKGERRRGKGHDGLYQGLSTATKDTYDALHMQALPPRGSGEGRGSLLTCGDVEENPGPMALPVTALLLPLALLLHAARPNWVNVISDLKKIEDLIQSMHIDATLYTESDVHPSCKVTAMKCFLLELQVISLESGDASIHDTVENLIILANNSLSSNGNVTESGCKECEELEEKNIKEFLQSFVHIVQMFINTSTTTPAPRPPTPAPTIASQPLSLRPEACRPAAGGAVHTRGLDFACDIYIWAPLAGTCGVLLLSLVITLYC

SEQ ID NO: 381 - protein, 726 aa, synthetic construct
  REGION 1..726: note = NK77.73_CD70_DB04_D07 construct
MALPVTALLLPLALLLHAARPDYKDDDDKGGGGSGGGGSQVQLVQSGAEVKKPGSSVKVSCKASGGTFRNYAISWVRQAPGQGLEWMGGIIPIFGTANYAQKFQGRVTITADESTSTAYMELSSLRSEDTAVYYCARDHSAGTHHDAFDIWGQGTMVTVSSGGGGSGGGGSGGGGSDIQMTQSPSSLSASVGDRVTITCRASQGISNYLAWYQQKPGKAPKLLIYAASSLQSGVPSRFSGSGSGTDFTLTISSLQPEDFATYYCQQSHSTPLTFGQGTKVEIKTTTPAPRPPTPAPTIASQPLSLRPEACRPAAGGAVHTRGLDFACDIYIWAPLAGTCGVLLLSLVITLYCRRDQRLPPDAHKPPGGGSFRTPIQEEQADAHSTLAKIRVKFSRSADAPAYQQGQNQLYNELNLGRREEYDVLDKRRGRDPEMGGKPRRKNPQEGLYNELQKDKMAEAYSEIGMKGERRRGKGHDGLYQGLSTATKDTYDALHMQALPPRGSGEGRGSLLTCGDVEENPGPMALPVTALLLPLALLLHAARPNWVNVISDLKKIEDLIQSMHIDATLYTESDVHPSCKVTAMKCFLLELQVISLESGDASIHDTVENLIILANNSLSSNGNVTESGCKECEELEEKNIKEFLQSFVHIVQMFINTSTTTPAPRPPTPAPTIASQPLSLRPEACRPAAGGAVHTRGLDFACDIYIWAPLAGTCGVLLLSLVITLYC

SEQ ID NO: 382 - protein, 721 aa, synthetic construct
  REGION 1..721: note = NK77.74_CD70_DB04_D08 construct
MALPVTALLLPLALLLHAARPDYKDDDDKGGGGSGGGGSQVQLVQSGAEVKKPGASVKVSCKASGYTFTSYYIHWVRQAPGQGLEWMGWMNPNSGNAGYAQKFQGRVTMTRDTSTSTVYMELSSLRSEDTAVYYCAREYWGSFDYWGQGTLVTVSSGGGGSGGGGSGGGGSDIQMTQSPSSLSASVGDRVTITCRASQGISNNLNWYQQKPGKAPKLLIYDASNLETGVPSRFSGSGSGTDFTLTISSLQPEDFATYYCQQSYSTPYTFGQGTKVEIKTTTPAPRPPTPAPTIASQPLSLRPEACRPAAGGAVHTRGLDFACDIYIWAPLAGTCGVLLLSLVITLYCRRDQRLPPDAHKPPGGGSFRTPIQEEQADAHSTLAKIRVKFSRSADAPAYQQGQNQLYNELNLGRREEYDVLDKRRGRDPEMGGKPRRKNPQEGLYNELQKDKMAEAYSEIGMKGERRRGKGHDGLYQGLSTATKDTYDALHMQALPPRGSGEGRGSLLTCGDVEENPGPMALPVTALLLPLALLLHAARPNWVNVISDLKKIEDLIQSMHIDATLYTESDVHPSCKVTAMKCFLLELQVISLESGDASIHDTVENLIILANNSLSSNGNVTESGCKECEELEEKNIKEFLQSFVHIVQMFINTSTTTPAPRPPTPAPTIASQPLSLRPEACRPAAGGAVHTRGLDFACDIYIWAPLAGTCGVLLLSLVITLYC

SEQ ID NO: 383 - protein, 722 aa, synthetic construct
  REGION 1..722: note = NK77.75_CD70_DB04_D10 construct
MALPVTALLLPLALLLHAARPDYKDDDDKGGGGSGGGGSQVQLVQSGAEVKKPGASVKVSCKASGYTFTGYYMHWVRQAPGQGLEWMGMIDPSDGSTIYAQKFQGRVTMTRDTSTSTVYMELSSLRSEDTAVYYCARERPLYASDLWGQGTLVTVSSGGGGSGGGGSGGGGSDIQMTQSPSSLSASVGDRVTITCRASQDIGNDLGWYQQKPGKAPKLLIYAASSLQSGVPSRFSGSGSGTDFTLTISSLQPEDFATYYCLQDYDYPLTFGQGTKVEIKTTTPAPRPPTPAPTIASQPLSLRPEACRPAAGGAVHTRGLDFACDIYIWAPLAGTCGVLLLSLVITLYCRRDQRLPPDAHKPPGGGSFRTPIQEEQADAHSTLAKIRVKFSRSADAPAYQQGQNQLYNELNLGRREEYDVLDKRRGRDPEMGGKPRRKNPQEGLYNELQKDKMAEAYSEIGMKGERRRGKGHDGLYQGLSTATKDTYDALHMQALPPRGSGEGRGSLLTCGDVEENPGPMALPVTALLLPLALLLHAARPNWVNVISDLKKIEDLIQSMHIDATLYTESDVHPSCKVTAMKCFLLELQVISLESGDASIHDTVENLIILANNSLSSNGNVTESGCKECEELEEKNIKEFLQSFVHIVQMFINTSTTTPAPRPPTPAPTIASQPLSLRPEACRPAAGGAVHTRGLDFACDIYIWAPLAGTCGVLLLSLVITLYC

SEQ ID NO: 384 - protein, 723 aa, synthetic construct
  REGION 1..723: note = NK77.85_CD70_DB03_B02 construct
MALPVTALLLPLALLLHAARPDYKDDDDKGGGGSGGGGSQVQLVQSGAEVKKPGSSVKVSCKASGYTFTNYYMHWVRQAPGQGLEWMGWMNPDSGNTGYAQKFQGRVTITADESTSTAYMELSSLRSEDTAVYYCARSSSSWPDFDLWGRGTLVTVSSGGGGSGGGGSGGGGSDIQMTQSPSSLSASVGDRVTITCRASQSISSYLNWYQQKPGKAPKLLIYDASNLETGVPSRFSGSGSGTDFTLTISSLQPEDFATYYCQQSYNTPYSFGQGTKVEIKTTTPAPRPPTPAPTIASQPLSLRPEACRPAAGGAVHTRGLDFACDIYIWAPLAGTCGVLLLSLVITLYCRRDQRLPPDAHKPPGGGSFRTPIQEEQADAHSTLAKIRVKFSRSADAPAYQQGQNQLYNELNLGRREEYDVLDKRRGRDPEMGGKPRRKNPQEGLYNELQKDKMAEAYSEIGMKGERRRGKGHDGLYQGLSTATKDTYDALHMQALPPRGSGEGRGSLLTCGDVEENPGPMALPVTALLLPLALLLHAARPNWVNVISDLKKIEDLIQSMHIDATLYTESDVHPSCKVTAMKCFLLELQVISLESGDASIHDTVENLIILANNSLSSNGNVTESGCKECEELEEKNIKEFLQSFVHIVQMFINTSTTTPAPRPPTPAPTIASQPLSLRPEACRPAAGGAVHTRGLDFACDIYIWAPLAGTCGVLLLSLVITLYC

SEQ ID NO: 385 - protein, 724 aa, synthetic construct
  REGION 1..724: note = NK77.86_CD70_DB04_A06 construct
MALPVTALLLPLALLLHAARPDYKDDDDKGGGGSGGGGSQVQLVQSGAEVKKPGASVKVSCKASGYTFTSYSMHWVRQAPGQGLEWVGIINPSSGSASYAQKFQGRVTMTRDTSTSTVYMELSSLRSEDTAVYYCARERGAYSSTFDYWGQGTLVTVSSGGGGSGGGGSGGGGSDIQMTQSPSSLSASVGDRVTITCRTSQSISSYLNWYQQKPGKAPKLLIYDASNLETGVPSRFSGSGSGTDFTLTISSLQPEDFATYYCLQDYSYPLTFGQGTKVEIKTTTPAPRPPTPAPTIASQPLSLRPEACRPAAGGAVHTRGLDFACDIYIWAPLAGTCGVLLLSLVITLYCRRDQRLPPDAHKPPGGGSFRTPIQEEQADAHSTLAKIRVKFSRSADAPAYQQGQNQLYNELNLGRREEYDVLDKRRGRDPEMGGKPRRKNPQEGLYNELQKDKMAEAYSEIGMKGERRRGKGHDGLYQGLSTATKDTYDALHMQALPPRGSGEGRGSLLTCGDVEENPGPMALPVTALLLPLALLLHAARPNWVNVISDLKKIEDLIQSMHIDATLYTESDVHPSCKVTAMKCFLLELQVISLESGDASIHDTVENLIILANNSLSSNGNVTESGCKECEELEEKNIKEFLQSFVHIVQMFINTSTTTPAPRPPTPAPTIASQPLSLRPEACRPAAGGAVHTRGLDFACDIYIWAPLAGTCGVLLLSLVITLYC

SEQ ID NO: 386 - protein, 724 aa, synthetic construct
  REGION 1..724: note = NK77.87_CD70_DB04_A09 construct
MALPVTALLLPLALLLHAARPDYKDDDDKGGGGSGGGGSQVQLVQSGAEVKKPGASVKVSCKASGYTFTDYYMHWVRQAPGQGLEWMGVINPSDGTAHYAQRLQGRVTMTRDTSTSTVYMELSSLRSEDTAVYYCARDSGSYYADFDYWGQGTLVTVSSGGGGSGGGGSGGGGSDIQMTQSPSSLSASVGDRVTITCQASQDISNYLNWYQQKPGKAPKLLIYDASSLQSGVPSRFSGSGSGTDFTLTISSLQPEDFATYYCQQSYSTPPAFGQGTKVEIKTTTPAPRPPTPAPTIASQPLSLRPEACRPAAGGAVHTRGLDFACDIYIWAPLAGTCGVLLLSLVITLYCRRDQRLPPDAHKPPGGGSFRTPIQEEQADAHSTLAKIRVKFSRSADAPAYQQGQNQLYNELNLGRREEYDVLDKRRGRDPEMGGKPRRKNPQEGLYNELQKDKMAEAYSEIGMKGERRRGKGHDGLYQGLSTATKDTYDALHMQALPPRGSGEGRGSLLTCGDVEENPGPMALPVTALLLPLALLLHAARPNWVNVISDLKKIEDLIQSMHIDATLYTESDVHPSCKVTAMKCFLLELQVISLESGDASIHDTVENLIILANNSLSSNGNVTESGCKECEELEEKNIKEFLQSFVHIVQMFINTSTTTPAPRPPTPAPTIASQPLSLRPEACRPAAGGAVHTRGLDFACDIYIWAPLAGTCGVLLLSLVITLYC

SEQ ID NO: 387 - protein, 989 aa, synthetic construct
  REGION 1..989: note = NK77.76_38-38 construct
MALPVTALLLPLALLLHAARPDYKDDDDKGGGGSGGGGSQVQLVQSGAEVKKPGASVKVSCKASGYSFTSYYMHWVRQAPGQGLEWMGIINPSGGTTSYAQKFQGRVTMTRDTSTSTVYMELSSLRSEDTAVYYCARDNSPYSSSWWDYFDYWGQGTLVTVSSGGGGSGGGGSGGGGSDIQMTQSPSSLSASVGDRVTITCRASQDIRHYLAWYQQKPGKAPKLLIYDASSLQSGVPSRFSGSGSGTDFTLTISSLQPEDFATYYCQQTYDAPITFGQGTRLEIKGGGGSGGGGSGGGGSQVQLVQSGAEVKKPGASVKVSCKASGYSFTSYYMHWVRQAPGQGLEWMGIINPSGGTTSYAQKFQGRVTMTRDTSTSTVYMELSSLRSEDTAVYYCARDNSPYSSSWWDYFDYWGQGTLVTVSSGGGGSGGGGSGGGGSDIQMTQSPSSLSASVGDRVTITCRASQDIRHYLAWYQQKPGKAPKLLIYDASSLQSGVPSRFSGSGSGTDFTLTISSLQPEDFATYYCQQTYDAPITFGQGTRLEIKTTTPAPRPPTPAPTIASQPLSLRPEACRPAAGGAVHTRGLDFACDIYIWAPLAGTCGVLLLSLVITLYCRRDQRLPPDAHKPPGGGSFRTPIQEEQADAHSTLAKIRVKFSRSADAPAYQQGQNQLYNELNLGRREEYDVLDKRRGRDPEMGGKPRRKNPQEGLYNELQKDKMAEAYSEIGMKGERRRGKGHDGLYQGLSTATKDTYDALHMQALPPRGSGEGRGSLLTCGDVEENPGPMALPVTALLLPLALLLHAARPNWVNVISDLKKIEDLIQSMHIDATLYTESDVHPSCKVTAMKCFLLELQVISLESGDASIHDTVENLIILANNSLSSNGNVTESGCKECEELEEKNIKEFLQSFVHIVQMFINTSTTTPAPRPPTPAPTIASQPLSLRPEACRPAAGGAVHTRGLDFACDIYIWAPLAGTCGVLLLSLVITLYC

SEQ ID NO: 388 - protein, 989 aa, synthetic construct
  REGION 1..989: note = NK77.77_64-64 construct
MALPVTALLLPLALLLHAARPDYKDDDDKGGGGSGGGGSQVQLVQSGAEVKKPGSSVKVSCKASGYTFTSYGISWVRQAPGQGLEWMGGIIPIFGTTNYAQKFQGRVTITADESTSTAYMELSSLRSEDTAVYYCARDHSGDGYFDLWGRGTLVTVSSGGGGSGGGGSGGGGSDIVMTQSPLSLPVTPGEPASISCRSSQSLLHSNGYNYLDWYLQKPGQSPQLLIYDASSLQSGVPDRFSGSGSGTDFTLKISRVEAEDVGVYYCMQGTHWPPTFGQGTKVEIKGGGGSGGGGSGGGGSQVQLVQSGAEVKKPGSSVKVSCKASGYTFTSYGISWVRQAPGQGLEWMGGIIPIFGTTNYAQKFQGRVTITADESTSTAYMELSSLRSEDTAVYYCARDHSGDGYFDLWGRGTLVTVSSGGGGSGGGGSGGGGSDIVMTQSPLSLPVTPGEPASISCRSSQSLLHSNGYNYLDWYLQKPGQSPQLLIYDASSLQSGVPDRFSGSGSGTDFTLKISRVEAEDVGVYYCMQGTHWPPTFGQGTKVEIKTTTPAPRPPTPAPTIASQPLSLRPEACRPAAGGAVHTRGLDFACDIYIWAPLAGTCGVLLLSLVITLYCRRDQRLPPDAHKPPGGGSFRTPIQEEQADAHSTLAKIRVKFSRSADAPAYQQGQNQLYNELNLGRREEYDVLDKRRGRDPEMGGKPRRKNPQEGLYNELQKDKMAEAYSEIGMKGERRRGKGHDGLYQGLSTATKDTYDALHMQALPPRGSGEGRGSLLTCGDVEENPGPMALPVTALLLPLALLLHAARPNWVNVISDLKKIEDLIQSMHIDATLYTESDVHPSCKVTAMKCFLLELQVISLESGDASIHDTVENLIILANNSLSSNGNVTESGCKECEELEEKNIKEFLQSFVHIVQMFINTSTTTPAPRPPTPAPTIASQPLSLRPEACRPAAGGAVHTRGLDFACDIYIWAPLAGTCGVLLLSLVITLYC

SEQ ID NO: 389 - protein, 977 aa, synthetic construct
  REGION 1..977: note = NK77.78_65-65 construct
MALPVTALLLPLALLLHAARPDYKDDDDKGGGGSGGGGSQVQLVQSGAEVKKPGASVKVSCKASGYTFTENEMHWVRQAPGQGLEWMGWINPNSGGTNYAQKFQGRVTMTRDTSTSTVYMELSSLRSEDTAVYYCAGSWGGYYFDYWGQGTLVTVSSGGGGSGGGGSGGGGSDIQMTQSPSSLSASVGDRVTITCRASQSVSRYLNWYQQKPGKAPKLLIYDASNLETGVPSRFSGSGSGTDFTLTISSLQPEDFATYYCQQADSFPVTFGQGTKLEIKGGGGSGGGGSGGGGSQVQLVQSGAEVKKPGASVKVSCKASGYTFTENEMHWVRQAPGQGLEWMGWINPNSGGTNYAQKFQGRVTMTRDTSTSTVYMELSSLRSEDTAVYYCAGSWGGYYFDYWGQGTLVTVSSGGGGSGGGGSGGGGSDIQMTQSPSSLSASVGDRVTITCRASQSVSRYLNWYQQKPGKAPKLLIYDASNLETGVPSRFSGSGSGTDFTLTISSLQPEDFATYYCQQADSFPVTFGQGTKLEIKTTTPAPRPPTPAPTIASQPLSLRPEACRPAAGGAVHTRGLDFACDIYIWAPLAGTCGVLLLSLVITLYCRRDQRLPPDAHKPPGGGSFRTPIQEEQADAHSTLAKIRVKFSRSADAPAYQQGQNQLYNELNLGRREEYDVLDKRRGRDPEMGGKPRRKNPQEGLYNELQKDKMAEAYSEIGMKGERRRGKGHDGLYQGLSTATKDTYDALHMQALPPRGSGEGRGSLLTCGDVEENPGPMALPVTALLLPLALLLHAARPNWVNVISDLKKIEDLIQSMHIDATLYTESDVHPSCKVTAMKCFLLELQVISLESGDASIHDTVENLIILANNSLSSNGNVTESGCKECEELEEKNIKEFLQSFVHIVQMFINTSTTTPAPRPPTPAPTIASQPLSLRPEACRPAAGGAVHTRGLDFACDIYIWAPLAGTCGVLLLSLVITLYC

SEQ ID NO: 390 - protein, 992 aa, synthetic construct
  REGION 1..992: note = NK77.79_38-67 construct
MALPVTALLLPLALLLHAARPDYKDDDDKGGGGSGGGGSQVQLVQSGAEVKKPGASVKVSCKASGYSFTSYYMHWVRQAPGQGLEWMGIINPSGGTTSYAQKFQGRVTMTRDTSTSTVYMELSSLRSEDTAVYYCARDNSPYSSSWWDYFDYWGQGTLVTVSSGGGGSGGGGSGGGGSDIQMTQSPSSLSASVGDRVTITCRASQDIRHYLAWYQQKPGKAPKLLIYDASSLQSGVPSRFSGSGSGTDFTLTISSLQPEDFATYYCQQTYDAPITFGQGTRLEIKGGGGSGGGGSGGGGSQVQLVQSGAEVKKPGSSVKVSCKASGGTFSSYAISWVRQAPGQGLEWMGGITPMFGTTDYAQKFQGRVTITADESTSTAYMELSSLRSEDTAVYYCARDERDGYATVAFDIWGQGTMVTVSSGGGGSGGGGSGGGGSDIVMTQSPLSLPVTPGEPASISCRSSQSLLHSNGYNYLDWYLQKPGQSPQLLIYDASNLETGVPDRFSGSGSGTDFTLKISRVEAEDVGVYYCMQGTHWPPTFGQGTKVEIKTTTPAPRPPTPAPTIASQPLSLRPEACRPAAGGAVHTRGLDFACDIYIWAPLAGTCGVLLLSLVITLYCRRDQRLPPDAHKPPGGGSFRTPIQEEQADAHSTLAKIRVKFSRSADAPAYQQGQNQLYNELNLGRREEYDVLDKRRGRDPEMGGKPRRKNPQEGLYNELQKDKMAEAYSEIGMKGERRRGKGHDGLYQGLSTATKDTYDALHMQALPPRGSGEGRGSLLTCGDVEENPGPMALPVTALLLPLALLLHAARPNWVNVISDLKKIEDLIQSMHIDATLYTESDVHPSCKVTAMKCFLLELQVISLESGDASIHDTVENLIILANNSLSSNGNVTESGCKECEELEEKNIKEFLQSFVHIVQMFINTSTTTPAPRPPTPAPTIASQPLSLRPEACRPAAGGAVHTRGLDFACDIYIWAPLAGTCGVLLLSLVITLYC

SEQ ID NO: 391 - protein, 987 aa, synthetic construct
  REGION 1..987: note = NK77.80_38-68 construct
MALPVTALLLPLALLLHAARPDYKDDDDKGGGGSGGGGSQVQLVQSGAEVKKPGASVKVSCKASGYSFTSYYMHWVRQAPGQGLEWMGIINPSGGTTSYAQKFQGRVTMTRDTSTSTVYMELSSLRSEDTAVYYCARDNSPYSSSWWDYFDYWGQGTLVTVSSGGGGSGGGGSGGGGSDIQMTQSPSSLSASVGDRVTITCRASQDIRHYLAWYQQKPGKAPKLLIYDASSLQSGVPSRFSGSGSGTDFTLTISSLQPEDFATYYCQQTYDAPITFGQGTRLEIKGGGGSGGGGSGGGGSQVQLVQSGAEVKKPGASVKVSCKASGYTFTSYYMHWVRQAPGQGLEWMGIINPSDGGTSYADKFQGRVTMTRDTSTSTVYMELSSLRSEDTAVYYCARALAPLGWGDGMDVWGQGTTVTVSSGGGGSGGGGSGGGGSDIQMTQSPSSLSASVGDRVTITCQASQDISNYLNWYQQKPGKAPKLLIYDASNLETGVPSRFSGSGSGTDFTLTISSLQPEDFATYYCQQSYDGPITFGQGTRLEIKTTTPAPRPPTPAPTIASQPLSLRPEACRPAAGGAVHTRGLDFACDIYIWAPLAGTCGVLLLSLVITLYCRRDQRLPPDAHKPPGGGSFRTPIQEEQADAHSTLAKIRVKFSRSADAPAYQQGQNQLYNELNLGRREEYDVLDKRRGRDPEMGGKPRRKNPQEGLYNELQKDKMAEAYSEIGMKGERRRGKGHDGLYQGLSTATKDTYDALHMQALPPRGSGEGRGSLLTCGDVEENPGPMALPVTALLLPLALLLHAARPNWVNVISDLKKIEDLIQSMHIDATLYTESDVHPSCKVTAMKCFLLELQVISLESGDASIHDTVENLIILANNSLSSNGNVTESGCKECEELEEKNIKEFLQSFVHIVQMFINTSTTTPAPRPPTPAPTIASQPLSLRPEACRPAAGGAVHTRGLDFACDIYIWAPLAGTCGVLLLSLVITLYC

SEQ ID NO: 392 - protein, 992 aa, synthetic construct
  REGION 1..992: note = NK77.81_64-67 construct
MALPVTALLLPLALLLHAARPDYKDDDDKGGGGSGGGGSQVQLVQSGAEVKKPGSSVKVSCKASGYTFTSYGISWVRQAPGQGLEWMGGIIPIFGTTNYAQKFQGRVTITADESTSTAYMELSSLRSEDTAVYYCARDHSGDGYFDLWGRGTLVTVSSGGGGSGGGGSGGGGSDIVMTQSPLSLPVTPGEPASISCRSSQSLLHSNGYNYLDWYLQKPGQSPQLLIYDASSLQSGVPDRFSGSGSGTDFTLKISRVEAEDVGVYYCMQGTHWPPTFGQGTKVEIKGGGGSGGGGSGGGGSQVQLVQSGAEVKKPGSSVKVSCKASGGTFSSYAISWVRQAPGQGLEWMGGITPMFGTTDYAQKFQGRVTITADESTSTAYMELSSLRSEDTAVYYCARDERDGYATVAFDIWGQGTMVTVSSGGGGSGGGGSGGGGSDIVMTQSPLSLPVTPGEPASISCRSSQSLLHSNGYNYLDWYLQKPGQSPQLLIYDASNLETGVPDRFSGSGSGTDFTLKISRVEAEDVGVYYCMQGTHWPPTFGQGTKVEIKTTTPAPRPPTPAPTIASQPLSLRPEACRPAAGGAVHTRGLDFACDIYIWAPLAGTCGVLLLSLVITLYCRRDQRLPPDAHKPPGGGSFRTPIQEEQADAHSTLAKIRVKFSRSADAPAYQQGQNQLYNELNLGRREEYDVLDKRRGRDPEMGGKPRRKNPQEGLYNELQKDKMAEAYSEIGMKGERRRGKGHDGLYQGLSTATKDTYDALHMQALPPRGSGEGRGSLLTCGDVEENPGPMALPVTALLLPLALLLHAARPNWVNVISDLKKIEDLIQSMHIDATLYTESDVHPSCKVTAMKCFLLELQVISLESGDASIHDTVENLIILANNSLSSNGNVTESGCKECEELEEKNIKEFLQSFVHIVQMFINTSTTTPAPRPPTPAPTIASQPLSLRPEACRPAAGGAVHTRGLDFACDIYIWAPLAGTCGVLLLSLVITLYC

SEQ ID NO: 393 - protein, 987 aa, synthetic construct
  REGION 1..987: note = NK77.82_64-68 construct
MALPVTALLLPLALLLHAARPDYKDDDDKGGGGSGGGGSQVQLVQSGAEVKKPGSSVKVSCKASGYTFTSYGISWVRQAPGQGLEWMGGIIPIFGTTNYAQKFQGRVTITADESTSTAYMELSSLRSEDTAVYYCARDHSGDGYFDLWGRGTLVTVSSGGGGSGGGGSGGGGSDIVMTQSPLSLPVTPGEPASISCRSSQSLLHSNGYNYLDWYLQKPGQSPQLLIYDASSLQSGVPDRFSGSGSGTDFTLKISRVEAEDVGVYYCMQGTHWPPTFGQGTKVEIKGGGGSGGGGSGGGGSQVQLVQSGAEVKKPGASVKVSCKASGYTFTSYYMHWVRQAPGQGLEWMGIINPSDGGTSYADKFQGRVTMTRDTSTSTVYMELSSLRSEDTAVYYCARALAPLGWGDGMDVWGQGTTVTVSSGGGGSGGGGSGGGGSDIQMTQSPSSLSASVGDRVTITCQASQDISNYLNWYQQKPGKAPKLLIYDASNLETGVPSRFSGSGSGTDFTLTISSLQPEDFATYYCQQSYDGPITFGQGTRLEIKTTTPAPRPPTPAPTIASQPLSLRPEACRPAAGGAVHTRGLDFACDIYIWAPLAGTCGVLLLSLVITLYCRRDQRLPPDAHKPPGGGSFRTPIQEEQADAHSTLAKIRVKFSRSADAPAYQQGQNQLYNELNLGRREEYDVLDKRRGRDPEMGGKPRRKNPQEGLYNELQKDKMAEAYSEIGMKGERRRGKGHDGLYQGLSTATKDTYDALHMQALPPRGSGEGRGSLLTCGDVEENPGPMALPVTALLLPLALLLHAARPNWVNVISDLKKIEDLIQSMHIDATLYTESDVHPSCKVTAMKCFLLELQVISLESGDASIHDTVENLIILANNSLSSNGNVTESGCKECEELEEKNIKEFLQSFVHIVQMFINTSTTTPAPRPPTPAPTIASQPLSLRPEACRPAAGGAVHTRGLDFACDIYIWAPLAGTCGVLLLSLVITLYC

SEQ ID NO: 394 - protein, 986 aa, synthetic construct
  REGION 1..986: note = NK77.83_65-67 construct
MALPVTALLLPLALLLHAARPDYKDDDDKGGGGSGGGGSQVQLVQSGAEVKKPGASVKVSCKASGYTFTENEMHWVRQAPGQGLEWMGWINPNSGGTNYAQKFQGRVTMTRDTSTSTVYMELSSLRSEDTAVYYCAGSWGGYYFDYWGQGTLVTVSSGGGGSGGGGSGGGGSDIQMTQSPSSLSASVGDRVTITCRASQSVSRYLNWYQQKPGKAPKLLIYDASNLETGVPSRFSGSGSGTDFTLTISSLQPEDFATYYCQQADSFPVTFGQGTKLEIKGGGGSGGGGSGGGGSQVQLVQSGAEVKKPGSSVKVSCKASGGTFSSYAISWVRQAPGQGLEWMGGITPMFGTTDYAQKFQGRVTITADESTSTAYMELSSLRSEDTAVYYCARDERDGYATVAFDIWGQGTMVTVSSGGGGSGGGGSGGGGSDIVMTQSPLSLPVTPGEPASISCRSSQSLLHSNGYNYLDWYLQKPGQSPQLLIYDASNLETGVPDRFSGSGSGTDFTLKISRVEAEDVGVYYCMQGTHWPPTFGQGTKVEIKTTTPAPRPPTPAPTIASQPLSLRPEACRPAAGGAVHTRGLDFACDIYIWAPLAGTCGVLLLSLVITLYCRRDQRLPPDAHKPPGGGSFRTPIQEEQADAHSTLAKIRVKFSRSADAPAYQQGQNQLYNELNLGRREEYDVLDKRRGRDPEMGGKPRRKNPQEGLYNELQKDKMAEAYSEIGMKGERRRGKGHDGLYQGLSTATKDTYDALHMQALPPRGSGEGRGSLLTCGDVEENPGPMALPVTALLLPLALLLHAARPNWVNVISDLKKIEDLIQSMHIDATLYTESDVHPSCKVTAMKCFLLELQVISLESGDASIHDTVENLIILANNSLSSNGNVTESGCKECEELEEKNIKEFLQSFVHIVQMFINTSTTTPAPRPPTPAPTIASQPLSLRPEACRPAAGGAVHTRGLDFACDIYIWAPLAGTCGVLLLSLVITLYC

SEQ ID NO: 395 - protein, 981 aa, synthetic construct
  REGION 1..981: note = NK77.84_65-68 construct
MALPVTALLLPLALLLHAARPDYKDDDDKGGGGSGGGGSQVQLVQSGAEVKKPGASVKVSCKASGYTFTENEMHWVRQAPGQGLEWMGWINPNSGGTNYAQKFQGRVTMTRDTSTSTVYMELSSLRSEDTAVYYCAGSWGGYYFDYWGQGTLVTVSSGGGGSGGGGSGGGGSDIQMTQSPSSLSASVGDRVTITCRASQSVSRYLNWYQQKPGKAPKLLIYDASNLETGVPSRFSGSGSGTDFTLTISSLQPEDFATYYCQQADSFPVTFGQGTKLEIKGGGGSGGGGSGGGGSQVQLVQSGAEVKKPGASVKVSCKASGYTFTSYYMHWVRQAPGQGLEWMGIINPSDGGTSYADKFQGRVTMTRDTSTSTVYMELSSLRSEDTAVYYCARALAPLGWGDGMDVWGQGTTVTVSSGGGGSGGGGSGGGGSDIQMTQSPSSLSASVGDRVTITCQASQDISNYLNWYQQKPGKAPKLLIYDASNLETGVPSRFSGSGSGTDFTLTISSLQPEDFATYYCQQSYDGPITFGQGTRLEIKTTTPAPRPPTPAPTIASQPLSLRPEACRPAAGGAVHTRGLDFACDIYIWAPLAGTCGVLLLSLVITLYCRRDQRLPPDAHKPPGGGSFRTPIQEEQADAHSTLAKIRVKFSRSADAPAYQQGQNQLYNELNLGRREEYDVLDKRRGRDPEMGGKPRRKNPQEGLYNELQKDKMAEAYSEIGMKGERRRGKGHDGLYQGLSTATKDTYDALHMQALPPRGSGEGRGSLLTCGDVEENPGPMALPVTALLLPLALLLHAARPNWVNVISDLKKIEDLIQSMHIDATLYTESDVHPSCKVTAMKCFLLELQVISLESGDASIHDTVENLIILANNSLSSNGNVTESGCKECEELEEKNIKEFLQSFVHIVQMFINTSTTTPAPRPPTPAPTIASQPLSLRPEACRPAAGGAVHTRGLDFACDIYIWAPLAGTCGVLLLSLVITLYC

SEQ ID NO: 396 - DNA, 20 bp, Homo sapiens
  misc_feature 1..20: note = A2AR-1 guide RNA
  source 1..20: mol_type = other DNA
cgaggagcccatgatgggca

SEQ ID NO: 397 - DNA, 20 bp, Homo sapiens
  misc_feature 1..20: note = A2AR-2 guide RNA
  source 1..20: mol_type = other DNA
gggcaatgtgctggtgtgct

SEQ ID NO: 398 - DNA, 20 bp, Homo sapiens
  misc_feature 1..20: note = A2AR-3 guide RNA
  source 1..20: mol_type = other DNA
cagtgacaccacaaagtagt

SEQ ID NO: 399 - protein, 26 aa, synthetic construct
  REGION 1..26: note = FW-H1_1
QVQLVQSGAEVKKPGASVKVSCKASG

SEQ ID NO: 400 - protein, 26 aa, synthetic construct
  REGION 1..26: note = FW-H1_2
QVQLVQSGAEVKKPGSSVKVSCKASG

SEQ ID NO: 401 - protein, 26 aa, synthetic construct
  REGION 1..26: note = FW-H1_3
EVQLLESGGGLVQPGGSLRLSCAASG

SEQ ID NO: 402 - protein, 26 aa, synthetic construct
  REGION 1..26: note = FW-H1_4
EVQLVESGGGLVKPGGSLRLSCAASG

SEQ ID NO: 403 - protein, 13 aa, synthetic construct
  REGION 1..13: note = FW-H2_1
WVRQAPGQGLEWM

SEQ ID NO: 404 - protein, 13 aa, synthetic construct
  REGION 1..13: note = FW-H2_2
WVRQAPGQGLEWV

SEQ ID NO: 405 - protein, 13 aa, synthetic construct
  REGION 1..13: note = FW-H2_3
WVRQAPGKGLEWV

SEQ ID NO: 406 - protein, 13 aa, synthetic construct
  REGION 1..13: note = FW-H2_4
WVRQAPGQGLEWI

SEQ ID NO: 407 - protein, 34 aa, synthetic construct
  REGION 1..34: note = FW-H3_1
QKFQGRVTMTRDTSTSTVYMELSSLRSEDTAVYY

SEQ ID NO: 408 - protein, 34 aa, synthetic construct
  REGION 1..34: note = FW-H3_2
QRFQGRVTMTRDTSTSTVYMELSSLRSEDTAVYY

SEQ ID NO: 409 - protein, 34 aa, synthetic construct
  REGION 1..34: note = FW-H3_3
HKFQGRVTMTRDTSTSTVYMELSSLRSEDTAVYY

SEQ ID NO: 410 - protein, 34 aa, synthetic construct
  REGION 1..34: note = FW-H3_4
QKFQGRVTITADESTSTAYMELSSLRSEDTAVYY

SEQ ID NO: 411 - protein, 34 aa, synthetic construct
  REGION 1..34: note = FW-H3_5
LKFQGRVTMTRDTSTSTVYMELSSLRSEDTAVYY

SEQ ID NO: 412 - protein, 34 aa, synthetic construct
  REGION 1..34: note = FW-H3_6
QNFQGRVTMTRDTSTSTVYMELSSLRSEDTAVYY

SEQ ID NO: 413 - protein, 34 aa, synthetic construct
  REGION 1..34: note = FW-H3_7
QMFQGRVTMTRDTSTSTVYMELSSLRSEDTAVYY

SEQ ID NO: 414 - protein, 34 aa, synthetic construct
  REGION 1..34: note = FW-H3_8
QEFQGRVTMTRDTSTSTVYMELSSLRSEDTAVYY

SEQ ID NO: 415 - protein, 34 aa, synthetic construct
  REGION 1..34: note = FW-H3_9
EEFQGRVTITADESTSTAYMELSSLRSEDTAVYY

SEQ ID NO: 416 - protein, 34 aa, synthetic construct
  REGION 1..34: note = FW-H3_10
QTFQGRVTMTRDTSTSTVYMELSSLRSEDTAVYY

SEQ ID NO: 417 - protein, 34 aa, synthetic construct
  REGION 1..34: note = FW-H3_11
QSFQGRVTMTRDTSTSTVYMELSSLRSEDTAVYY

SEQ ID NO: 418 - protein, 34 aa, synthetic construct
  REGION 1..34: note = FW-H3_12
DSVKGRFTISRDNSKNTLYLQMNSLRAEDTAVYY

SEQ ID NO: 419 - protein, 34 aa, synthetic construct
  REGION 1..34: note = FW-H3_13
QNLQGRVTMTRDTSTSTVYMELSSLRSEDTAVYY

SEQ ID NO: 420 - protein, 34 aa, synthetic construct
  REGION 1..34: note = FW-H3_14
PKFQGRVTITADESTSTAYMELSSLRSEDTAVYY

SEQ ID NO: 421 - protein, 34 aa, synthetic construct
  REGION 1..34: note = FW-H3_15
DSVKGRFTISRDDSKNTLYLQMNSLKTEDTAVYY

SEQ ID NO: 422 - protein, 34 aa, synthetic construct
  REGION 1..34: note = FW-H3_16
DKFQGRVTMTRDTSTSTVYMELSSLRSEDTAVYY

SEQ ID NO: 423 - protein, 10 aa, synthetic construct
  REGION 1..10: note = FW-H4_1
GQGTLVTVSS

SEQ ID NO: 424 - protein, 10 aa, synthetic construct
  REGION 1..10: note = FW-H4_2
GRGTLVTVSS

SEQ ID NO: 425 - protein, 10 aa, synthetic construct
  REGION 1..10: note = FW-H4_3
GQGTTVTVSS

SEQ ID NO: 426 - protein, 10 aa, synthetic construct
  REGION 1..10: note = FW-H4_4
GQGTMVTVSS

SEQ ID NO: 427 - protein, 10 aa, synthetic construct
  REGION 1..10: note = FW-H4_5
GKGTTVTVSS

SEQ ID NO: 428 - protein, 9 aa, synthetic construct
  REGION 1..9: note = NK77.1_CD70_DB01_C03_CDR-H1
YTFTGHYLH

SEQ ID NO: 429 - protein, 9 aa, synthetic construct
  REGION 1..9: note = NK77.2_CD70_DB01_D02_CDR-H1
YTFTNYYMH

SEQ ID NO: 430 - protein, 9 aa, synthetic construct
  REGION 1..9: note = NK77.3_CD70_DB01_E06_CDR-H1
YTFTGYYIH

SEQ ID NO: 431 - protein, 9 aa, synthetic construct
  REGION 1..9: note = NK77.4_CD70_DB01_G04_CDR-H1
GTFRSHVIS

SEQ ID NO: 432 - protein, 9 aa, synthetic construct
  REGION 1..9: note = NK77.5_CD70_DB01_G05_CDR-H1
YTFIDYYIH

SEQ ID NO: 433 - protein, 9 aa, synthetic construct
  REGION 1..9: note = NK77.6_CD70_DB01_G07_CDR-H1
YTFTSYYMH

SEQ ID NO: 434 - protein, 9 aa, synthetic construct
  REGION 1..9: note = NK77.7_CD70_DB01_G11_CDR-H1
YTFTGYYMH

SEQ ID NO: 435 - protein, 9 aa, synthetic construct
  REGION 1..9: note = NK77.9_CD70_DB02_A03_CDR-H1
YTFTENEMH

SEQ ID NO: 436 - protein, 9 aa, synthetic construct
  REGION 1..9: note = NK77.10_CD70_DB02_A04_CDR-H1
YTFTENEMH

SEQ ID NO: 437 - protein, 9 aa, synthetic construct
  REGION 1..9: note = NK77.11_CD70_DB02_A05_CDR-H1
YTFTSYYMH

SEQ ID NO: 438 - protein, 9 aa, synthetic construct
  REGION 1..9: note = NK77.12_CD70_DB02_A06_CDR-H1
YTFTGYYMH

SEQ ID NO: 439 - protein, 9 aa, synthetic construct
  REGION 1..9: note = NK77.13_CD70_DB02_A07_CDR-H1
YTFTGYYMH

SEQ ID NO: 440 - protein, 9 aa, synthetic construct
  REGION 1..9: note = NK77.14_CD70_DB02_A08_CDR-H1
YTFTSYDIN

SEQ ID NO: 441 - protein, 9 aa, synthetic construct
  REGION 1..9: note = NK77.15_CD70_DB02_A09_CDR-H1
YTFTSYYMH

SEQ ID NO: 442 - protein, 9 aa, synthetic construct
  REGION 1..9: note = NK77.16_CD70_DB02_A11_CDR-H1
YTFTSYYMH

SEQ ID NO: 443 - protein, 9 aa, synthetic construct
  REGION 1..9: note = NK77.17_CD70_DB02_B06_CDR-H1
YTFTDYYMH

SEQ ID NO: 444 - protein, 9 aa, synthetic construct
  REGION 1..9: note = NK77.18_CD70_DB02_B09_CDR-H1
YTFTGYYMH

SEQ ID NO: 445 - protein, 9 aa, synthetic construct
  REGION 1..9: note = NK77.19_CD70_DB02_C03_CDR-H1
YTFTGYYMH

SEQ ID NO: 446 - protein, 9 aa, synthetic construct
  REGION 1..9: note = NK77.20_CD70_DB02_C04_CDR-H1
GTFSSYAIS

SEQ ID NO: 447 - protein, 9 aa, synthetic construct
  REGION 1..9: note = NK77.22_CD70_DB02_C07_CDR-H1
YTFTRNYMH

SEQ ID NO: 448 - protein, 9 aa, synthetic construct
  REGION 1..9: note = NK77.24_CD70_DB02_D02_CDR-H1
YTFTSYYMH

SEQ ID NO: 449 - protein, 9 aa, synthetic construct
  REGION 1..9: note = NK77.25_CD70_DB02_D04_CDR-H1
YRLSDHYMH

SEQ ID NO: 450 - protein, 9 aa, synthetic construct
  REGION 1..9: note = NK77.26_CD70_DB02_D10_CDR-H1
YTFTDYYVH

SEQ ID NO: 451 - protein, 12 aa, synthetic construct
  REGION 1..12: note = NK77.27_CD70_DB02_D11_CDR-H1
YTFTDYTDYFVH

SEQ ID NO: 452 - protein, 9 aa, synthetic construct
  REGION 1..9: note = NK77.28_CD70_DB02_E04_CDR-H1
YIFTDYYMH

SEQ ID NO: 453 - protein, 9 aa, synthetic construct
  REGION 1..9: note = NK77.29_CD70_DB02_F06_CDR-H1
YTFTDHYIH

SEQ ID NO: 454 - protein, 9 aa, synthetic construct
  REGION 1..9: note = NK77.31_CD70_DB02_F08_CDR-H1
YTFTSYYMH

SEQ ID NO: 455 - protein, 9 aa, synthetic construct
  REGION 1..9: note = NK77.32_CD70_DB02_G07_CDR-H1
YTFTDYYMH

SEQ ID NO: 456 - protein, 9 aa, synthetic construct
  REGION 1..9: note = NK77.33_CD70_DB02_H04_CDR-H1
YTFTGYYMH

SEQ ID NO: 457 - protein, 9 aa, synthetic construct
  REGION 1..9: note = NK77.34_CD70_DB02_H05_CDR-H1
YTFTDYFTH

SEQ ID NO: 458 - protein, 9 aa, synthetic construct
  REGION 1..9: note = NK77.35_CD70_DB02_H08_CDR-H1
YTFTSYYIH

SEQ ID NO: 459 - protein, 9 aa, synthetic construct
  REGION 1..9: note = NK77.36_CD70_DB03_A06_CDR-H1
GTFSSYAIS

SEQ ID NO: 460 - protein, 9 aa, synthetic construct
  REGION 1..9: note = NK77.37_CD70_DB03_A07_CDR-H1
GTFNSYGIS

SEQ ID NO: 461 - protein, 9 aa, synthetic construct
  REGION 1..9: note = NK77.38_CD70_DB03_A08_CDR-H1
YSFTSYYMH

SEQ ID NO: 462 - protein, 9 aa, synthetic construct
  REGION 1..9: note = NK77.39_CD70_DB03_A09_CDR-H1
YTFTDYYIH

SEQ ID NO: 463 - protein, 9 aa, synthetic construct
  REGION 1..9: note = NK77.40_CD70_DB03_A11_CDR-H1
YTFNGYLMH

SEQ ID NO: 464 - protein, 9 aa, synthetic construct
  REGION 1..9: note = NK77.41_CD70_DB03_A12_CDR-H1
YTFTSYYMH

SEQ ID NO: 465 - protein, 9 aa, synthetic construct
  REGION 1..9: note = NK77.42_CD70_DB03_B01_CDR-H1
YTFSDSYMH

SEQ ID NO: 466 - protein, 9 aa, synthetic construct
  REGION 1..9: note = NK77.43_CD70_DB03_B04_CDR-H1
YIFTDYYMH

SEQ ID NO: 467 - protein, 9 aa, synthetic construct
  REGION 1..9: note = NK77.44_CD70_DB03_B06_CDR-H1
YTFTDYYLH

SEQ ID NO: 468 - protein, 9 aa, synthetic construct
  REGION 1..9: note = NK77.45_CD70_DB03_B09_CDR-H1
YTFTAYYLH

SEQ ID NO: 469 - protein, 9 aa, synthetic construct
  REGION 1..9: note = NK77.46_CD70_DB03_C05_CDR-H1
YTFTDYYIH

SEQ ID NO: 470 - protein, 9 aa, synthetic construct
  REGION 1..9: note = NK77.47_CD70_DB03_D11_CDR-H1
FTFSNSDMN

SEQ ID NO: 471 - protein, 9 aa, synthetic construct
  REGION 1..9: note = NK77.48_CD70_DB03_E01_CDR-H1
YTFTSYYMH

SEQ ID NO: 472 - protein, 9 aa, synthetic construct
  REGION 1..9: note = NK77.49_CD70_DB03_E03_CDR-H1
GTFTNYAFS

SEQ ID NO: 473 - protein, 9 aa, synthetic construct
  REGION 1..9: note = NK77.50_CD70_DB03_E09_CDR-H1
YTFTAYYMH

SEQ ID NO: 474 - protein, 9 aa, synthetic construct
  REGION 1..9: note = NK77.51_CD70_DB03_F02_CDR-H1
YTFTDYYVH

SEQ ID NO: 475 - protein, 9 aa, synthetic construct
  REGION 1..9: note = NK77.52_CD70_DB03_F05_CDR-H1
YTFTAYHMH

SEQ ID NO: 476 - protein, 9 aa, synthetic construct
  REGION 1..9: note = NK77.53_CD70_DB03_F06_CDR-H1
GTFSSYAIS

SEQ ID NO: 477 - protein, 9 aa, synthetic construct
  REGION 1..9: note = NK77.54_CD70_DB03_F09_CDR-H1
YTFTSYYMH

SEQ ID NO: 478 - protein, 9 aa, synthetic construct
  REGION 1..9: note = NK77.55_CD70_DB03_F12_CDR-H1
YTFTSYGIS

SEQ ID NO: 479 - protein, 9 aa, synthetic construct
  REGION 1..9: note = NK77.56_CD70_DB03_G06_CDR-H1
YTFIDYYMH

SEQ ID NO: 480 - protein, 9 aa, synthetic construct
  REGION 1..9: note = NK77.57_CD70_DB03_G11_CDR-H1
YTFTGQYMH

SEQ ID NO: 481 - protein, 9 aa, synthetic construct
  REGION 1..9: note = NK77.58_CD70_DB03_H08_CDR-H1
YTFTSYDIN

SEQ ID NO: 482 - protein, 9 aa, synthetic construct
  REGION 1..9: note = NK77.59_CD70_DB03_H10_CDR-H1
YTFANYYMH

SEQ ID NO: 483 - protein, 9 aa, synthetic construct
  REGION 1..9: note = NK77.60_CD70_DB04_A05_CDR-H1
YTFTTYYMH

SEQ ID NO: 484 - protein, 9 aa, synthetic construct
  REGION 1..9: note = NK77.61_CD70_DB04_A07_CDR-H1
NTFTSYYMH

SEQ ID NO: 485 - protein, 9 aa, synthetic construct
  REGION 1..9: note = NK77.62_CD70_DB04_A10_CDR-H1
FTFSSYGMH

SEQ ID NO: 486 - protein, 9 aa, synthetic construct
  REGION 1..9: note = NK77.63_CD70_DB04_A11_CDR-H1
GTFSRYDIN

SEQ ID NO: 487 - protein, 9 aa, synthetic construct
  REGION 1..9: note = NK77.64_CD70_DB04_B03_CDR-H1
YTFTSYGIS

SEQ ID NO: 488 - protein, 9 aa, synthetic construct
  REGION 1..9: note = NK77.65_CD70_DB04_B05_CDR-H1
YTFTENEMH

SEQ ID NO: 489 - protein, 9 aa, synthetic construct
  REGION 1..9: note = NK77.66_CD70_DB04_B07_CDR-H1
YTFTNYYIY

SEQ ID NO: 490 - protein, 9 aa, synthetic construct
  REGION 1..9: note = NK77.67_CD70_DB04_C01_CDR-H1
GTFSSYAIS

SEQ ID NO: 491 - protein, 9 aa, synthetic construct
  REGION 1..9: note = NK77.68_CD70_DB04_C04_CDR-H1
YTFTSYYMH

SEQ ID NO: 492 - protein, 9 aa, synthetic construct
  REGION 1..9: note = NK77.69_CD70_DB04_C06_CDR-H1
YTFTSYYIH

SEQ ID NO: 493 - protein, 9 aa, synthetic construct
  REGION 1..9: note = NK77.70_CD70_DB04_C07_CDR-H1
YTFTDSYIH

SEQ ID NO: 494 - protein, 9 aa, synthetic construct
  REGION 1..9: note = NK77.71_CD70_DB04_D02_CDR-H1
YTFTSYDIN

SEQ ID NO: 495 - protein, 9 aa, synthetic construct
  REGION 1..9: note = NK77.72_CD70_DB04_D05_CDR-H1
FVFDDYAIH

SEQ ID NO: 496 - protein, 9 aa, synthetic construct
  REGION 1..9: note = NK77.73_CD70_DB04_D07_CDR-H1
GTFRNYAIS

SEQ ID NO: 497 - protein, 9 aa, synthetic construct
  REGION 1..9: note = NK77.74_CD70_DB04_D08_CDR-H1
YTFTSYYIH

SEQ ID NO: 498 - protein, 9 aa, synthetic construct
  REGION 1..9: note = NK77.75_CD70_DB04_D10_CDR-H1
YTFTGYYMH

SEQ ID NO: 499 - protein, 9 aa, synthetic construct
  REGION 1..9: note = NK77.85_CD70_DB03_B02_CDR-H1
YTFTNYYMH

SEQ ID NO: 500 - protein, 9 aa, synthetic construct
  REGION 1..9: note = NK77.86_CD70_DB04_A06_CDR-H1
YTFTSYSMH

SEQ ID NO: 501 - protein, 9 aa, synthetic construct
  REGION 1..9: note = NK77.87_CD70_DB04_A09_CDR-H1
YTFTDYYMH

SEQ ID NO: 502 - protein, 13 aa, synthetic construct
  REGION 1..13: note = NK77.1_CD70_DB01_C03_CDR-H2
GWINPNSGGTNYA

SEQ ID NO: 503 - protein, 13 aa, synthetic construct
  REGION 1..13: note = NK77.2_CD70_DB01_D02_CDR-H2
GIINPSGGSTSYA

SEQ ID NO: 504 - protein, 13 aa, synthetic construct
  REGION 1..13: note = NK77.3_CD70_DB01_E06_CDR-H2
GIINPSGGSTSYA

SEQ ID NO: 505 - protein, 13 aa, synthetic construct
  REGION 1..13: note = NK77.4_CD70_DB01_G04_CDR-H2
GIIDPSGGSTSYA

SEQ ID NO: 506 - protein, 13 aa, synthetic construct
  REGION 1..13: note = NK77.5_CD70_DB01_G05_CDR-H2
GWMNPNSGNTGYA

SEQ ID NO: 507 - protein, 13 aa, synthetic construct
  REGION 1..13: note = NK77.6_CD70_DB01_G07_CDR-H2
GWINPNSGGTKYA

SEQ ID NO: 508 - protein, 13 aa, synthetic construct
  REGION 1..13: note = NK77.7_CD70_DB01_G11_CDR-H2
GWMNPNSGNTGYA

SEQ ID NO: 509 - protein, 13 aa, synthetic construct
  REGION 1..13: note = NK77.9_CD70_DB02_A03_CDR-H2
GGIIPIFGTANYA

SEQ ID NO: 510 - protein, 13 aa, synthetic construct
  REGION 1..13: note = NK77.10_CD70_DB02_A04_CDR-H2
GWINSNGGYTGYA

SEQ ID NO: 511 - protein, 13 aa, synthetic construct
  REGION 1..13: note = NK77.11_CD70_DB02_A05_CDR-H2
GIINPSGGSTIYA

SEQ ID NO: 512 - protein, 13 aa, synthetic construct
  REGION 1..13: note = NK77.12_CD70_DB02_A06_CDR-H2
GWINPNSGDTGYA

SEQ ID NO: 513 - protein, 13 aa, synthetic construct
  REGION 1..13: note = NK77.13_CD70_DB02_A07_CDR-H2
GIINPSGGSTSYA

SEQ ID NO: 514 - protein, 13 aa, synthetic construct
  REGION 1..13: note = NK77.14_CD70_DB02_A08_CDR-H2
GIINPSDGSTIYA

SEQ ID NO: 515 - protein, 13 aa, synthetic construct
  REGION 1..13: note = NK77.15_CD70_DB02_A09_CDR-H2
GWMNPDNGDTGYA

SEQ ID NO: 516 - protein, 13 aa, synthetic construct
  REGION 1..13: note = NK77.16_CD70_DB02_A11_CDR-H2
GWMNPNSGDTGYA

SEQ ID NO: 517 - protein, 13 aa, synthetic construct
  REGION 1..13: note = NK77.17_CD70_DB02_B06_CDR-H2
GIINPNSGGTNYA

SEQ ID NO: 518 - protein, 13 aa, synthetic construct
  REGION 1..13: note = NK77.18_CD70_DB02_B09_CDR-H2
GIINPGDGGTIYA

SEQ ID NO: 519 - protein, 13 aa, synthetic construct
  REGION 1..13: note = NK77.19_CD70_DB02_C03_CDR-H2
GIINPSGGSTSYA

SEQ ID NO: 520 - protein, 13 aa, synthetic construct
  REGION 1..13: note = NK77.20_CD70_DB02_C04_CDR-H2
GMINPSDGATTYA

SEQ ID NO: 521 - protein, 13 aa, synthetic construct
  REGION 1..13: note = NK77.22_CD70_DB02_C07_CDR-H2
GWISPDNGVTNYA

SEQ ID NO: 522 - protein, 13 aa, synthetic construct
  REGION 1..13: note = NK77.24_CD70_DB02_D02_CDR-H2
GIIDPGSGDTSYA

SEQ ID NO: 523 - protein, 13 aa, synthetic construct
  REGION 1..13: note = NK77.25_CD70_DB02_D04_CDR-H2
GIINPSGGSTTYA

SEQ ID NO: 524 - protein, 13 aa, synthetic construct
  REGION 1..13: note = NK77.26_CD70_DB02_D10_CDR-H2
GWINPNTGGTSFA

SEQ ID NO: 525 - protein, 13 aa, synthetic construct
  REGION 1..13: note = NK77.27_CD70_DB02_D11_CDR-H2
GIFNPSDGSTSYA

SEQ ID NO: 526 - protein, 13 aa, synthetic construct
  REGION 1..13: note = NK77.28_CD70_DB02_E04_CDR-H2
GIINPSGGDTLYA

SEQ ID NO: 527 - protein, 13 aa, synthetic construct
  REGION 1..13: note = NK77.29_CD70_DB02_F06_CDR-H2
GWISAYNGKTNYA

SEQ ID NO: 528 - protein, 13 aa, synthetic construct
  REGION 1..13: note = NK77.31_CD70_DB02_F08_CDR-H2
GIINPSGGATIYA

SEQ ID NO: 529 - protein, 13 aa, synthetic construct
  REGION 1..13: note = NK77.32_CD70_DB02_G07_CDR-H2
GIINPSGGSTSYA

SEQ ID NO: 530 - protein, 13 aa, synthetic construct
  REGION 1..13: note = NK77.33_CD70_DB02_H04_CDR-H2
GIINPSGGDTIYA

SEQ ID NO: 531 - protein, 13 aa, synthetic construct
  REGION 1..13: note = NK77.34_CD70_DB02_H05_CDR-H2
GWINTYDGNTNYA

SEQ ID NO: 532 - protein, 13 aa, synthetic construct
  REGION 1..13: note = NK77.35_CD70_DB02_H08_CDR-H2
GRINPNGGGTNYA

SEQ ID NO: 533 - protein, 13 aa, synthetic construct
  REGION 1..13: note = NK77.36_CD70_DB03_A06_CDR-H2
GWISPNSGDTHYA

SEQ ID NO: 534 - protein, 13 aa, synthetic construct
  REGION 1..13: note = NK77.37_CD70_DB03_A07_CDR-H2
GGIIPIFGTANYA

SEQ ID NO: 535 - protein, 13 aa, synthetic construct
  REGION 1..13: note = NK77.38_CD70_DB03_A08_CDR-H2
GIINPSGGTTSYA

SEQ ID NO: 536 - protein, 13 aa, synthetic construct
  REGION 1..13: note = NK77.39_CD70_DB03_A09_CDR-H2
GWITPNSGYTYYA

SEQ ID NO: 537 - protein, 13 aa, synthetic construct
  REGION 1..13: note = NK77.40_CD70_DB03_A11_CDR-H2
GIVNPSDGSTGYA

SEQ ID NO: 538 - protein, 13 aa, synthetic construct
  REGION 1..13: note = NK77.41_CD70_DB03_A12_CDR-H2
GIIDPSGGRTIYA

SEQ ID NO: 539 - protein, 13 aa, synthetic construct
  REGION 1..13: note = NK77.42_CD70_DB03_B01_CDR-H2
GGIIPMAGIPAYA

SEQ ID NO: 540 - protein, 13 aa, synthetic construct
  REGION 1..13: note = NK77.43_CD70_DB03_B04_CDR-H2
GIINPSGGSTSYA

SEQ ID NO: 541 - protein, 13 aa, synthetic construct
  REGION 1..13: note = NK77.44_CD70_DB03_B06_CDR-H2
GWISAYNGNTNYA

SEQ ID NO: 542 - protein, 13 aa, synthetic construct
  REGION 1..13: note = NK77.45_CD70_DB03_B09_CDR-H2
GMINPNNGGTIYA

SEQ ID NO: 543 - protein, 13 aa, synthetic construct
  REGION 1..13: note = NK77.46_CD70_DB03_C05_CDR-H2
GMINPRGGSTTYA

SEQ ID NO: 544 - protein, 13 aa, synthetic construct
  REGION 1..13: note = NK77.47_CD70_DB03_D11_CDR-H2
SAISGGGDTLYYA

SEQ ID NO: 545 - protein, 13 aa, synthetic construct
  REGION 1..13: note = NK77.48_CD70_DB03_E01_CDR-H2
GWINPNNGGTSYA

SEQ ID NO: 546 - protein, 13 aa, synthetic construct
  REGION 1..13: note = NK77.49_CD70_DB03_E03_CDR-H2
GGIIPISGAANYA

SEQ ID NO: 547 - protein, 13 aa, synthetic construct
  REGION 1..13: note = NK77.50_CD70_DB03_E09_CDR-H2
GWMNPNSGNTGYA

SEQ ID NO: 548 - protein, 13 aa, synthetic construct
  REGION 1..13: note = NK77.51_CD70_DB03_F02_CDR-H2
GTINPSGGSTSYA

SEQ ID NO: 549 - protein, 13 aa, synthetic construct
  REGION 1..13: note = NK77.52_CD70_DB03_F05_CDR-H2
GIINPGDGATGYA

SEQ ID NO: 550 - protein, 13 aa, synthetic construct
  REGION 1..13: note = NK77.53_CD70_DB03_F06_CDR-H2
GWMNPNSGNTGYA

SEQ ID NO: 551 - protein, 13 aa, synthetic construct
  REGION 1..13: note = NK77.54_CD70_DB03_F09_CDR-H2
GIFNPSDGSTSYA

SEQ ID NO: 552 - protein, 13 aa, synthetic construct
  REGION 1..13: note = NK77.55_CD70_DB03_F12_CDR-H2
GWISAYNGHTNYA

SEQ ID NO: 553 - protein, 13 aa, synthetic construct
  REGION 1..13: note = NK77.56_CD70_DB03_G06_CDR-H2
GWMNPHSGNSDNA

SEQ ID NO: 554 - protein, 13 aa, synthetic construct
  REGION 1..13: note = NK77.57_CD70_DB03_G11_CDR-H2
GWINPNTGDTNYA

SEQ ID NO: 555 - protein, 13 aa, synthetic construct
  REGION 1..13: note = NK77.58_CD70_DB03_H08_CDR-H2
GVINPSGGGTSYA

SEQ ID NO: 556 - protein, 13 aa, synthetic construct
  REGION 1..13: note = NK77.59_CD70_DB03_H10_CDR-H2
GIINPSGGSTSYA

SEQ ID NO: 557 - protein, 13 aa, synthetic construct
  REGION 1..13: note = NK77.60_CD70_DB04_A05_CDR-H2
GIINPTGGSTYYA

SEQ ID NO: 558 - protein, 13 aa, synthetic construct
  REGION 1..13: note = NK77.61_CD70_DB04_A07_CDR-H2
GWINPNSGDTNYA

SEQ ID NO: 559 - protein, 13 aa, synthetic construct
  REGION 1..13: note = NK77.62_CD70_DB04_A10_CDR-H2
ASIKHDGSEQYYV

SEQ ID NO: 560 - protein, 13 aa, synthetic construct
  REGION 1..13: note = NK77.63_CD70_DB04_A11_CDR-H2
GIIDPTGASTSYA

SEQ ID NO: 561 - protein, 13 aa, synthetic construct
  REGION 1..13: note = NK77.64_CD70_DB04_B03_CDR-H2
GGIIPIFGTTNYA

SEQ ID NO: 562 - protein, 13 aa, synthetic construct
  REGION 1..13: note = NK77.65_CD70_DB04_B05_CDR-H2
GWINPNSGGTNYA

SEQ ID NO: 563 - protein, 13 aa, synthetic construct
  REGION 1..13: note = NK77.66_CD70_DB04_B07_CDR-H2
GWINPNDGATNYA

SEQ ID NO: 564 - protein, 13 aa, synthetic construct
  REGION 1..13: note = NK77.67_CD70_DB04_C01_CDR-H2
GGITPMFGTTDYA

SEQ ID NO: 565 - protein, 13 aa, synthetic construct
  REGION 1..13: note = NK77.68_CD70_DB04_C04_CDR-H2
GIINPSDGGTSYA

SEQ ID NO: 566 - protein, 13 aa, synthetic construct
  REGION 1..13: note = NK77.69_CD70_DB04_C06_CDR-H2
GWMNPSSGVTNFA

SEQ ID NO: 567 - protein, 13 aa, synthetic construct
  REGION 1..13: note = NK77.70_CD70_DB04_C07_CDR-H2
GWMNPNTGDTGYA

SEQ ID NO: 568 - protein, 13 aa, synthetic construct
  REGION 1..13: note = NK77.71_CD70_DB04_D02_CDR-H2
GVISPSGGGTSYA

SEQ ID NO: 569 - protein, 13 aa, synthetic construct
  REGION 1..13: note = NK77.72_CD70_DB04_D05_CDR-H2
AAISYDGSNKYYA

SEQ ID NO: 570 - protein, 13 aa, synthetic construct
  REGION 1..13: note = NK77.73_CD70_DB04_D07_CDR-H2
GGIIPIFGTANYA

SEQ ID NO: 571 - protein, 13 aa, synthetic construct
  REGION 1..13: note = NK77.74_CD70_DB04_D08_CDR-H2
GWMNPNSGNAGYA

SEQ ID NO: 572 - protein, 13 aa, synthetic construct
  REGION 1..13: note = NK77.75_CD70_DB04_D10_CDR-H2
GMIDPSDGSTIYA

SEQ ID NO: 573 - protein, 13 aa, synthetic construct
  REGION 1..13: note = NK77.85_CD70_DB03_B02_CDR-H2
GWMNPDSGNTGYA

SEQ ID NO: 574 - protein, 13 aa, synthetic construct
  REGION 1..13: note = NK77.86_CD70_DB04_A06_CDR-H2
GIINPSSGSASYA

SEQ ID NO: 575 - protein, 13 aa, synthetic construct
  REGION 1..13: note = NK77.87_CD70_DB04_A09_CDR-H2
GVINPSDGTAHYA

SEQ ID NO: 576 - protein, 13 aa, synthetic construct
  REGION 1..13: note = NK77.1_CD70_DB01_C03_CDR-H3
CVRGSGWYDLDYW

SEQ ID NO: 577 - protein, 14 aa, synthetic construct
  REGION 1..14: note = NK77.2_CD70_DB01_D02_CDR-H3
CARELGVAGYFDLW

SEQ ID NO: 578 - protein, 18 aa, synthetic construct
  REGION 1..18: note = NK77.3_CD70_DB01_E06_CDR-H3
CARDLSGIDGYIGFFDYW

SEQ ID NO: 579 - protein, 14 aa, synthetic construct
  REGION 1..14: note = NK77.4_CD70_DB01_G04_CDR-H3
CAKDYTGLLGMDVW

SEQ ID NO: 580 - protein, 14 aa, synthetic construct
  REGION 1..14: note = NK77.5_CD70_DB01_G05_CDR-H3
CARGLSGYDLDDYW

SEQ ID NO: 581 - protein, 13 aa, synthetic construct
  REGION 1..13: note = NK77.6_CD70_DB01_G07_CDR-H3
CARGLSGYDFDYW

SEQ ID NO: 582 - protein, 14 aa, synthetic construct
  REGION 1..14: note = NK77.7_CD70_DB01_G11_CDR-H3
CARGTDVYGDFDYW

SEQ ID NO: 583 - protein, 21 aa, synthetic construct
  REGION 1..21: note = NK77.9_CD70_DB02_A03_CDR-H3
CAREGGTAMATGYYYYGMDVW

SEQ ID NO: 584 - protein, 14 aa, synthetic construct
  REGION 1..14: note = NK77.10_CD70_DB02_A04_CDR-H3
CARASNYGGHFDYW

SEQ ID NO: 585 - protein, 15 aa, synthetic construct
  REGION 1..15: note = NK77.11_CD70_DB02_A05_CDR-H3
CAKDMGAWAAGFDYW

SEQ ID NO: 586 - protein, 15 aa, synthetic construct
  REGION 1..15: note = NK77.12_CD70_DB02_A06_CDR-H3
CARSVNDYGDYDGYW

SEQ ID NO: 587 - protein, 15 aa, synthetic construct
  REGION 1..15: note = NK77.13_CD70_DB02_A07_CDR-H3
CARDYGDYDASFDYW

SEQ ID NO: 588 - protein, 12 aa, synthetic construct
  REGION 1..12: note = NK77.14_CD70_DB02_A08_CDR-H3
CVKEEAWYFDLW

SEQ ID NO: 589 - protein, 12 aa, synthetic construct
  REGION 1..12: note = NK77.15_CD70_DB02_A09_CDR-H3
CASGDYYDILYW

SEQ ID NO: 590 - protein, 13 aa, synthetic construct
  REGION 1..13: note = NK77.16_CD70_DB02_A11_CDR-H3
CARGPSGYEFDYW

SEQ ID NO: 591 - protein, 17 aa, synthetic construct
  REGION 1..17: note = NK77.17_CD70_DB02_B06_CDR-H3
CARDFSVYAAADGMDVW

SEQ ID NO: 592 - protein, 16 aa, synthetic construct
  REGION 1..16: note = NK77.18_CD70_DB02_B09_CDR-H3
CARGFGESAPDAFDIW

SEQ ID NO: 593 - protein, 13 aa, synthetic construct
  REGION 1..13: note = NK77.19_CD70_DB02_C03_CDR-H3
CAAGTEIYYMDVW

SEQ ID NO: 594 - protein, 22 aa, synthetic construct
  REGION 1..22: note = NK77.20_CD70_DB02_C04_CDR-H3
CARERELLHFATNYYYYGMDVW

SEQ ID NO: 595 - protein, 18 aa, synthetic construct
  REGION 1..18: note = NK77.22_CD70_DB02_C07_CDR-H3
CAKTQGSSSWYQWYFDLW

SEQ ID NO: 596 - protein, 14 aa, synthetic construct
  REGION 1..14: note = NK77.24_CD70_DB02_D02_CDR-H3
CARGSNWYDYFDYW

SEQ ID NO: 597 - protein, 14 aa, synthetic construct
  REGION 1..14: note = NK77.25_CD70_DB02_D04_CDR-H3
CASSYYGDYVLVNW

SEQ ID NO: 598 - protein, 15 aa, synthetic construct
  REGION 1..15: note = NK77.26_CD70_DB02_D10_CDR-H3
CARDLGQWLGEIDYW

SEQ ID NO: 599 - protein, 16 aa, synthetic construct [sequence omitted]

SEQ ID NO: 600 - protein, 15 aa, synthetic construct
  REGION 1..15: note = NK77.28_CD70_DB02_E04_CDR-H3
CAREGVGAMGVFDYW

SEQ ID NO: 601 - protein, 17 aa, synthetic construct
  REGION 1..17: note = NK77.29_CD70_DB02_F06_CDR-H3
CARDTIYYDFWSGYDYW

SEQ ID NO: 602 - protein, 17 aa, synthetic construct
  REGION 1..17: note = NK77.31_CD70_DB02_F08_CDR-H3
CARSRGDYYGSGDFDYW

SEQ ID NO: 603 - protein, 13 aa, synthetic construct
  REGION 1..13: note = NK77.32_CD70_DB02_G07_CDR-H3
CARGYFDHAFDIW

SEQ ID NO: 604 - protein, 19 aa, synthetic construct
  REGION 1..19: note = NK77.33_CD70_DB02_H04_CDR-H3
CARGDSSSWYDYYYYMDVW

SEQ ID NO: 605 - protein, 14 aa, synthetic construct
  REGION 1..14: note = NK77.34_CD70_DB02_H05_CDR-H3
CAREMEWLGQVDYW

SEQ ID NO: 606 - protein, 14 aa, synthetic construct
  REGION 1..14: note = NK77.35_CD70_DB02_H08_CDR-H3
CARGHRGGGGIDYW

SEQ ID NO: 607 - protein, 14 aa, synthetic construct
  REGION 1..14: note = NK77.36_CD70_DB03_A06_CDR-H3
CARDWGSGWYVDYW

SEQ ID NO: 608 - protein, 14 aa, synthetic construct
  REGION 1..14: note = NK77.37_CD70_DB03_A07_CDR-H3
CARDTYGDDAFDIW

SEQ ID NO: 609 - protein, 19 aa, synthetic construct
  REGION 1..19: note = NK77.38_CD70_DB03_A08_CDR-H3
CARDNSPYSSSWWDYFDYW

SEQ ID NO: 610 - protein, 17 aa, synthetic construct
  REGION 1..17: note = NK77.39_CD70_DB03_A09_CDR-H3
CARNTDCYGDFLGLDVW

SEQ ID NO: 611 - protein, 17 aa, synthetic construct
  REGION 1..17: note = NK77.40_CD70_DB03_A11_CDR-H3
CAKDTGLRYFDWLLDYW

SEQ ID NO: 612 - protein, 13 aa, synthetic construct
  REGION 1..13: note = NK77.41_CD70_DB03_A12_CDR-H3
CARHEAGGIFDYW

SEQ ID NO: 613 - protein, 16 aa, synthetic construct
  REGION 1..16: note = NK77.42_CD70_DB03_B01_CDR-H3
CARADDYGGNWYFDLW

SEQ ID NO: 614 - protein, 15 aa, synthetic construct
  REGION 1..15: note = NK77.43_CD70_DB03_B04_CDR-H3
CARDSGWYESWFDPW

SEQ ID NO: 615 - protein, 17 aa, synthetic construct
  REGION 1..17: note = NK77.44_CD70_DB03_B06_CDR-H3
CAREIVGATEDWYFDLW

SEQ ID NO: 616 - protein, 14 aa, synthetic construct
  REGION 1..14: note = NK77.45_CD70_DB03_B09_CDR-H3
CARDLGGYVLFDYW

SEQ ID NO: 617 - protein, 14 aa, synthetic construct
  REGION 1..14: note = NK77.46_CD70_DB03_C05_CDR-H3
CARDLGDYGDYDYW

SEQ ID NO: 618 - protein, 19 aa, synthetic construct
  REGION 1..19: note = NK77.47_CD70_DB03_D11_CDR-H3
CAMASALDSSGDNEAFDIW

SEQ ID NO: 619 - protein, 17 aa, synthetic construct
  REGION 1..17: note = NK77.48_CD70_DB03_E01_CDR-H3
CARVEDDFWSGPSFDYW

SEQ ID NO: 620 - protein, 14 aa, synthetic construct
  REGION 1..14: note = NK77.49_CD70_DB03_E03_CDR-H3
CARGSGLDDAFDIW

SEQ ID NO: 621 - protein, 24 aa, synthetic construct
  REGION 1..24: note = NK77.50_CD70_DB03_E09_CDR-H3
CAREGRIDYGDYDDYYYYYGMDVW

SEQ ID NO: 622 - protein, 15 aa, synthetic construct
  REGION 1..15: note = NK77.51_CD70_DB03_F02_CDR-H3
CARDQGLWFTGFDYW

SEQ ID NO: 623 - protein, 15 aa, synthetic construct
  REGION 1..15: note = NK77.52_CD70_DB03_F05_CDR-H3
CAGEGISGSDAFDIW

SEQ ID NO: 624 - protein, 13 aa, synthetic construct
  REGION 1..13: note = NK77.53_CD70_DB03_F06_CDR-H3
CAWGVDPYYFDYW

SEQ ID NO: 625 - protein, 13 aa, synthetic construct
  REGION 1..13: note = NK77.54_CD70_DB03_F09_CDR-H3
CARDVGETTFDPW

SEQ ID NO: 626 - protein, 18 aa, synthetic construct
  REGION 1..18: note = NK77.55_CD70_DB03_F12_CDR-H3
CARDSVRGWDYYYGMGVW

SEQ ID NO: 627 - protein, 15 aa, synthetic construct
  REGION 1..15: note = NK77.56_CD70_DB03_G06_CDR-H3
CARGYSGYDLTADYW

SEQ ID NO: 628 - protein, 24 aa, synthetic construct
  REGION 1..24: note = NK77.57_CD70_DB03_G11_CDR-H3
CARDSVFEVEGGTDYYYYYGMDVW

SEQ ID NO: 629 - protein, 14 aa, synthetic construct
  REGION 1..14: note = NK77.58_CD70_DB03_H08_CDR-H3
CARYSGYDWVFDYW

SEQ ID NO: 630 - protein, 15 aa, synthetic construct
  REGION 1..15: note = NK77.59_CD70_DB03_H10_CDR-H3
CARDSGSYFGWFDPW

SEQ ID NO: 631 - protein, 15 aa, synthetic construct
  REGION 1..15: note = NK77.60_CD70_DB04_A05_CDR-H3
CARDSGNYQGIFDYW

SEQ ID NO: 632 - protein, 14 aa, synthetic construct
  REGION 1..14: note = NK77.61_CD70_DB04_A07_CDR-H3
CARGVSGYDLFDYW

SEQ ID NO: 633 - protein, 9 aa, synthetic construct
  REGION 1..9: note = NK77.62_CD70_DB04_A10_CDR-H3
CAASGVDVW

SEQ ID NO: 634 - protein, 17 aa, synthetic construct
  REGION 1..17: note = NK77.63_CD70_DB04_A11_CDR-H3
CARDYSYGMDYYGMDVW

SEQ ID NO: 635 - protein, 14 aa, synthetic construct
  REGION 1..14: note = NK77.64_CD70_DB04_B03_CDR-H3
CARDHSGDGYFDLW

SEQ ID NO: 636 - protein, 13 aa, synthetic construct
  REGION 1..13: note = NK77.65_CD70_DB04_B05_CDR-H3
CAGSWGGYYFDYW

SEQ ID NO: 637 - protein, 16 aa, synthetic construct
  REGION 1..16: note = NK77.66_CD70_DB04_B07_CDR-H3
CAREGNDYYYYFMDYW

SEQ ID NO: 638 - protein, 17 aa, synthetic construct
  REGION 1..17: note = NK77.67_CD70_DB04_C01_CDR-H3
CARDERDGYATVAFDIW

SEQ ID NO: 639 - protein, 17 aa, synthetic construct
  REGION 1..17: note = NK77.68_CD70_DB04_C04_CDR-H3
CARALAPLGWGDGMDVW

SEQ ID NO: 640 - protein, 14 aa, synthetic construct
  REGION 1..14: note = NK77.69_CD70_DB04_C06_CDR-H3
CARGSDQGDWSDPW

SEQ ID NO: 641 - protein, 17 aa, synthetic construct
  REGION 1..17: note = NK77.70_CD70_DB04_C07_CDR-H3
CAKDDFGELAPATFDPW

SEQ ID NO: 642 - protein, 17 aa, synthetic construct
  REGION 1..17: note = NK77.71_CD70_DB04_D02_CDR-H3
CARYYGGNPEGWYFDLW

SEQ ID NO: 643 - protein, 27 aa, synthetic construct
  REGION 1..27: note = NK77.72_CD70_DB04_D05_CDR-H3
CARAPQYYGSGTDPLEVRYYYYGMDVW

SEQ ID NO: 644 - protein, 17 aa, synthetic construct
  REGION 1..17: note = NK77.73_CD70_DB04_D07_CDR-H3
CARDHSAGTHHDAFDIW

SEQ ID NO: 645 - protein, 12 aa, synthetic construct
  REGION 1..12: note = NK77.74_CD70_DB04_D08_CDR-H3
CAREYWGSFDYW

SEQ ID NO: 646 - protein, 13 aa, synthetic construct
  REGION 1..13: note = NK77.75_CD70_DB04_D10_CDR-H3
CARERPLYASDLW

SEQ ID NO: 647 - protein, 14 aa, synthetic construct
  REGION 1..14: note = NK77.85_CD70_DB03_B02_CDR-H3
CARSSSSWPDFDLW

SEQ ID NO: 648 - protein, 15 aa, synthetic construct
  REGION 1..15: note = NK77.86_CD70_DB04_A06_CDR-H3
CARERGAYSSTFDYW

SEQ ID NO: 649 - protein, 15 aa, synthetic construct
  REGION 1..15: note = NK77.87_CD70_DB04_A09_CDR-H3
CARDSGSYYADFDYW

SEQ ID NO: 650 - protein, 23 aa, synthetic construct
  REGION 1..23: note = FW-L1_1
DIQMTQSPSSLSASVGDRVTITC

SEQ ID NO: 651 - protein, 23 aa, synthetic construct
  REGION 1..23: note = FW-L1_2
DIVMTQSPLSLPVTPGEPASISC

SEQ ID NO: 652 - protein, 23 aa, synthetic construct
  REGION 1..23: note = FW-L1_3
EIVMTQSPATLSVSPGERATLSC

SEQ ID NO: 653 - protein, 23 aa, synthetic construct
  REGION 1..23: note = FW-L1_4
DIVMTQSPDSLAVSLGERATINC

SEQ ID NO: 654 - protein, 15 aa, synthetic construct
  REGION 1..15: note = FW-L2_1
WYQQKPGKAPKLLIY

SEQ ID NO: 655 - protein, 15 aa, synthetic construct
  REGION 1..15: note = FW-L2_2
WYLQKPGQSPQLLIY

SEQ ID NO: 656 - protein, 15 aa, synthetic construct
  REGION 1..15: note = FW-L2_3
WYQQKPGQAPRLLIY

SEQ ID NO: 657 - protein, 15 aa, synthetic construct
  REGION 1..15: note = FW-L2_4
WYQQKPGQPPKLLIY

SEQ ID NO: 658 - protein, 31 aa, synthetic construct
  REGION 1..31: note = FW-L3_1
GVPSRFSGSGSGTDFTLTISSLQPEDFATYY

SEQ ID NO: 659 - protein, 31 aa, synthetic construct
  REGION 1..31: note = FW-L3_2
GVPDRFSGSGSGTDFTLKISRVEAEDVGVYY

SEQ ID NO: 660 - protein, 31 aa, synthetic construct
  REGION 1..31: note = FW-L3_3
GIPARFSGSGSGTEFTLTISSLQSEDFAVYY

SEQ ID NO: 661 - protein, 31 aa, synthetic construct
  REGION 1..31: note = FW-L3_4
GVPDRFSGSGSGTDFTLTISSLQAEDVAVYY

SEQ ID NO: 662 - protein, 9 aa, synthetic construct
  REGION 1..9: note = FW-L4_1
GQGTRLEIK

SEQ ID NO: 663 - protein, 9 aa, synthetic construct
  REGION 1..9: note = FW-L4_2
GQGTKLEIK

SEQ ID NO: 664 - protein, 9 aa, synthetic construct
  REGION 1..9: note = FW-L4_3
GQGTKVEIK

SEQ ID NO: 665 - protein, 9 aa, synthetic construct
  REGION 1..9: note = FW-L4_4
GGGTKVEIK

SEQ ID NO: 666 - protein, 9 aa, synthetic construct
  REGION 1..9: note = FW-L4_5
GPGTKVDIK

SEQ ID NO: 667 - protein, 9 aa, synthetic construct
  REGION 1..9: note = FW-L4_6
GGGTKLEIK

SEQ ID NO: 668 - protein, 11 aa, synthetic construct
  REGION 1..11: note = NK77.1_CD70_DB01_C03_CDR-L1
RASQNIGTYLA

SEQ ID NO: 669 - protein, 11 aa, synthetic construct
  REGION 1..11: note = NK77.2_CD70_DB01_D02_CDR-L1
RASQRISNWLA

SEQ ID NO: 670 - protein, 16 aa, synthetic construct
  REGION 1..16: note = NK77.3_CD70_DB01_E06_CDR-L1
RSSQSLLHSNGYNYLD

SEQ ID NO: 671 - protein, 11 aa, synthetic construct
  REGION 1..11: note = NK77.4_CD70_DB01_G04_CDR-L1
RASQDIDTYLA

SEQ ID NO: 672 - protein, 11 aa, synthetic construct
  REGION 1..11: note = NK77.5_CD70_DB01_G05_CDR-L1
QASQDISNYLN

SEQ ID NO: 673 - protein, 11 aa, synthetic construct
  REGION 1..11: note = NK77.6_CD70_DB01_G07_CDR-L1
QASQDISNYLN

SEQ ID NO: 674 - protein, 11 aa, synthetic construct
  REGION 1..11: note = NK77.7_CD70_DB01_G11_CDR-L1
RASQSISSYLN

SEQ ID NO: 675 - protein, 11 aa, synthetic construct
  REGION 1..11: note = NK77.9_CD70_DB02_A03_CDR-L1
QASQDISNYLN

SEQ ID NO: 676 - protein, 16 aa, synthetic construct
  REGION 1..16: note = NK77.10_CD70_DB02_A04_CDR-L1
RSSQSLLHSNGYNYLD

SEQ ID NO: 677 - protein, 11 aa, synthetic construct
  REGION 1..11: note = NK77.11_CD70_DB02_A05_CDR-L1
QASQDISNYLN

SEQ ID NO: 678 - protein, 11 aa, synthetic construct
  REGION 1..11: note = NK77.12_CD70_DB02_A06_CDR-L1
QASQDISNYLN

SEQ ID NO: 679 - protein, 11 aa, synthetic construct
  REGION 1..11: note = NK77.13_CD70_DB02_A07_CDR-L1
RASQSIDNWLA

SEQ ID NO: 680 - protein, 11 aa, synthetic construct
  REGION 1..11: note = NK77.14_CD70_DB02_A08_CDR-L1
QASQDISNYLN

SEQ ID NO: 681 - protein, 11 aa, synthetic construct
  REGION 1..11: note = NK77.15_CD70_DB02_A09_CDR-L1
QASQDISNYLN

SEQ ID NO: 682 - protein, 11 aa, synthetic construct
  REGION 1..11: note = NK77.16_CD70_DB02_A11_CDR-L1
RASQTISNYLN

SEQ ID NO: 683 - protein, 11 aa, synthetic construct
  REGION 1..11: note = NK77.17_CD70_DB02_B06_CDR-L1
RASQSISSYLN

SEQ ID NO: 684 - protein, 11 aa, synthetic construct
  REGION 1..11: note = NK77.18_CD70_DB02_B09_CDR-L1
QASQDISNYLN

SEQ ID NO: 685 - protein, 11 aa, synthetic construct
  REGION 1..11: note = NK77.19_CD70_DB02_C03_CDR-L1
RASQTIDIYLN

SEQ ID NO: 686 - protein, 11 aa, synthetic construct
  REGION 1..11: note = NK77.20_CD70_DB02_C04_CDR-L1
RASQGISNNLN

SEQ ID NO: 687 - protein, 11 aa, synthetic construct
  REGION 1..11: note = NK77.22_CD70_DB02_C07_CDR-L1
RASQSIGTWLA

SEQ ID NO: 688 - protein, 11 aa, synthetic construct
  REGION 1..11: note = NK77.24_CD70_DB02_D02_CDR-L1
RASQSVSSYLA

SEQ ID NO: 689 - protein, 11 aa, synthetic construct
  REGION 1..11: note = NK77.25_CD70_DB02_D04_CDR-L1
QASQDISNYLN

SEQ ID NO: 690 - protein, 11 aa, synthetic construct
  REGION 1..11: note = NK77.26_CD70_DB02_D10_CDR-L1
RASQTIYKWLA

SEQ ID NO: 691 - protein, 11 aa, synthetic construct
  REGION 1..11: note = NK77.27_CD70_DB02_D11_CDR-L1
QASQDISNYLN

SEQ ID NO: 692 - protein, 11 aa, synthetic construct
  REGION 1..11: note = NK77.28_CD70_DB02_E04_CDR-L1
RASTSISDYVH

SEQ ID NO: 693 - protein, 11 aa, synthetic construct
  REGION 1..11: note = NK77.29_CD70_DB02_F06_CDR-L1
RASQGISNNLN

SEQ ID NO: 694 - protein, 11 aa, synthetic construct
  REGION 1..11: note = NK77.31_CD70_DB02_F08_CDR-L1
RASQTISNYLN

SEQ ID NO: 695 - protein, 11 aa, synthetic construct
  REGION 1..11: note = NK77.32_CD70_DB02_G07_CDR-L1
RASQSISTYLN

SEQ ID NO: 696 - protein, 11 aa, synthetic construct
  REGION 1..11: note = NK77.33_CD70_DB02_H04_CDR-L1
QASQDISNYLN

SEQ ID NO: 697 - protein, 11 aa, synthetic construct
  REGION 1..11: note = NK77.34_CD70_DB02_H05_CDR-L1
RASQDIRNDLG

SEQ ID NO: 698 - protein, 11 aa, synthetic construct
  REGION 1..11: note = NK77.35_CD70_DB02_H08_CDR-L1
RASQEISNYLA

SEQ ID NO: 699 - protein, 11 aa, synthetic construct
  REGION 1..11: note = NK77.36_CD70_DB03_A06_CDR-L1
QASQDISDSLN

SEQ ID NO: 700 - protein, 11 aa, synthetic construct
  REGION 1..11: note = NK77.37_CD70_DB03_A07_CDR-L1
RASQSISSWLA

SEQ ID NO: 701 - protein, 11 aa, synthetic construct
  REGION 1..11: note = NK77.38_CD70_DB03_A08_CDR-L1
RASQDIRHYLA

SEQ ID NO: 702 - protein, 11 aa, synthetic construct
  REGION 1..11: note = NK77.39_CD70_DB03_A09_CDR-L1
RASSSISNYLA

SEQ ID NO: 703 - protein, 11 aa, synthetic construct
  REGION 1..11: note = NK77.40_CD70_DB03_A11_CDR-L1
RASQGITNFLA

SEQ ID NO: 704 - protein, 11 aa, synthetic construct
  REGION 1..11: note = NK77.41_CD70_DB03_A12_CDR-L1
QASQDISNYLN

SEQ ID NO: 705 - protein, 16 aa, synthetic construct
  REGION 1..16: note = NK77.42_CD70_DB03_B01_CDR-L1
RSSQSLLHSNGYNYLD

SEQ ID NO: 706 - protein, 11 aa, synthetic construct
  REGION 1..11: note = NK77.43_CD70_DB03_B04_CDR-L1
RASQDIRDGLG

SEQ ID NO: 707 - protein, 11 aa, synthetic construct
  REGION 1..11: note = NK77.44_CD70_DB03_B06_CDR-L1
RASQSVSSYLA

SEQ ID NO: 708 - protein, 11 aa, synthetic construct
  REGION 1..11: note = NK77.45_CD70_DB03_B09_CDR-L1
RASQSISSYLN

SEQ ID NO: 709 - protein, 11 aa, synthetic construct
  REGION 1..11: note = NK77.46_CD70_DB03_C05_CDR-L1
RASQSISTNLA

SEQ ID NO: 710 - protein, 17 aa, synthetic construct
  REGION 1..17: note = NK77.47_CD70_DB03_D11_CDR-L1
KSSQSVLYSSNNKNYLA

SEQ ID NO: 711 - protein, 11 aa, synthetic construct
  REGION 1..11: note = NK77.48_CD70_DB03_E01_CDR-L1
QASHDISKFLN

SEQ ID NO: 712 - protein, 16 aa, synthetic construct
  REGION 1..16: note = NK77.49_CD70_DB03_E03_CDR-L1
RSSQSLLHSNGYNYLD

SEQ ID NO: 713 - protein, 16 aa, synthetic construct
  REGION 1..16: note = NK77.50_CD70_DB03_E09_CDR-L1
RSSQSLLHSNGYNYLD

SEQ ID NO: 714 - protein, 11 aa, synthetic construct
  REGION 1..11: note = NK77.51_CD70_DB03_F02_CDR-L1
RASQGISNNLN

SEQ ID NO: 715 - protein, 11 aa, synthetic construct
  REGION 1..11: note = NK77.52_CD70_DB03_F05_CDR-L1
RASQSISSWLA

SEQ ID NO: 716 - protein, 11 aa, synthetic construct
  REGION 1..11: note = NK77.53_CD70_DB03_F06_CDR-L1
RASQSINRWLA

SEQ ID NO: 717 - protein, 11 aa, synthetic construct
  REGION 1..11: note = NK77.54_CD70_DB03_F09_CDR-L1
QASQDISNYLN

SEQ ID NO: 718 - protein, 11 aa, synthetic construct
  REGION 1..11: note = NK77.55_CD70_DB03_F12_CDR-L1
QASQDIRNFLN

SEQ ID NO: 719 - protein, 11 aa, synthetic construct
  REGION 1..11: note = NK77.56_CD70_DB03_G06_CDR-L1
RASQSISNYLN

SEQ ID NO: 720 - protein, 11 aa, synthetic construct
  REGION 1..11: note = NK77.57_CD70_DB03_G11_CDR-L1
RASETISGWLA

SEQ ID NO: 721 - protein, 11 aa, synthetic construct
  REGION 1..11: note = NK77.58_CD70_DB03_H08_CDR-L1
RASQGIGSWLA

SEQ ID NO: 722 - protein, 11 aa, synthetic construct
  REGION 1..11: note = NK77.59_CD70_DB03_H10_CDR-L1
RASQSISSSLA

SEQ ID NO: 723 - protein, 11 aa, synthetic construct
  REGION 1..11: note = NK77.60_CD70_DB04_A05_CDR-L1
RASQGIGGYLA

SEQ ID NO: 724 - protein, 11 aa, synthetic construct
  REGION 1..11: note = NK77.61_CD70_DB04_A07_CDR-L1
RASQSVSSYLN

SEQ ID NO: 725 - protein, 16 aa, synthetic construct
  REGION 1..16: note = NK77.62_CD70_DB04_A10_CDR-L1
RSSQSLLHSNGYNYLD

SEQ ID NO: 726 - protein, 11 aa, synthetic construct
  REGION 1..11: note = NK77.63_CD70_DB04_A11_CDR-L1
QASQDISNYLN

SEQ ID NO: 727 - protein, 16 aa, synthetic construct
  REGION 1..16: note = NK77.64_CD70_DB04_B03_CDR-L1
RSSQSLLHSNGYNYLD

SEQ ID NO: 728 - protein, 11 aa, synthetic construct
  REGION 1..11: note = NK77.65_CD70_DB04_B05_CDR-L1
RASQSVSRYLN

SEQ ID NO: 729 - protein, 11 aa, synthetic construct
  REGION 1..11: note = NK77.66_CD70_DB04_B07_CDR-L1
RASQGISNNLN

SEQ ID NO: 730 - protein, 16 aa, synthetic construct
  REGION 1..16: note = NK77.67_CD70_DB04_C01_CDR-L1
RSSQSLLHSNGYNYLD

SEQ ID NO: 731 - protein, 11 aa, synthetic construct
  REGION 1..11: note = NK77.68_CD70_DB04_C04_CDR-L1
QASQDISNYLN

SEQ ID NO: 732 - protein, 11 aa, synthetic construct
  REGION 1..11: note = NK77.69_CD70_DB04_C06_CDR-L1
RASQSISSYLN

SEQ ID NO: 733 - protein, 11 aa, synthetic construct
  REGION 1..11: note = NK77.70_CD70_DB04_C07_CDR-L1
QASQDISNYLN

SEQ ID NO: 734 - protein, 11 aa, synthetic construct
  REGION 1..11: note = NK77.71_CD70_DB04_D02_CDR-L1
RASQSIGNWLA

SEQ ID NO: 735 - protein, 16 aa, synthetic construct
  REGION 1..16: note = NK77.72_CD70_DB04_D05_CDR-L1
RSSQSLLHSNGYNYLD

SEQ ID NO: 736 - protein, 11 aa, synthetic construct
  REGION 1..11: note = NK77.73_CD70_DB04_D07_CDR-L1
RASQGISNYLA

SEQ ID NO: 737 - protein, 11 aa, synthetic construct
  REGION 1..11: note = NK77.74_CD70_DB04_D08_CDR-L1
RASQGISNNLN

SEQ ID NO: 738 - protein, 11 aa, synthetic construct
  REGION 1..11: note = NK77.75_CD70_DB04_D10_CDR-L1
RASQDIGNDLG

SEQ ID NO: 739 - protein, 11 aa, synthetic construct
  REGION 1..11: note = NK77.85_CD70_DB03_B02_CDR-L1
RASQSISSYLN

SEQ ID NO: 740 - protein, 11 aa, synthetic construct
  REGION 1..11: note = NK77.86_CD70_DB04_A06_CDR-L1
RTSQSISSYLN

SEQ ID NO: 741 - protein, 11 aa, synthetic construct
  REGION 1..11: note = NK77.87_CD70_DB04_A09_CDR-L1
QASQDISNYLN

SEQ ID NO: 742 - protein, 7 aa, synthetic construct
  REGION 1..7: note = NK77.1_CD70_DB01_C03_CDR-L2
DASNLET

SEQ ID NO: 743 - protein, 7 aa, synthetic construct
  REGION 1..7: note = NK77.2_CD70_DB01_D02_CDR-L2
DASNLET

SEQ ID NO: 744 - protein, 7 aa, synthetic construct
  REGION 1..7: note = NK77.3_CD70_DB01_E06_CDR-L2
AASSLQS

SEQ ID NO: 745 - protein, 7 aa, synthetic construct
  REGION 1..7: note = NK77.4_CD70_DB01_G04_CDR-L2
AASSLQS

SEQ ID NO: 746 - protein, 7 aa, synthetic construct
  REGION 1..7: note = NK77.5_CD70_DB01_G05_CDR-L2
DASSLES

SEQ ID NO: 747 - protein, 7 aa, synthetic construct
  REGION 1..7: note = NK77.6_CD70_DB01_G07_CDR-L2
DASNLET

SEQ ID NO: 748 - protein, 7 aa, synthetic construct
  REGION 1..7: note = NK77.7_CD70_DB01_G11_CDR-L2
DASYLET

SEQ ID NO: 749 - protein, 7 aa, synthetic construct
  REGION 1..7: note = NK77.9_CD70_DB02_A03_CDR-L2
DASNLET

SEQ ID NO: 750 - protein, 7 aa, synthetic construct
  REGION 1..7: note = NK77.10_CD70_DB02_A04_CDR-L2
QASSLES

SEQ ID NO: 751 - protein, 7 aa, synthetic construct
  REGION 1..7: note = NK77.11_CD70_DB02_A05_CDR-L2
ATSTLAN

SEQ ID NO: 752 - protein, 7 aa, synthetic construct
  REGION 1..7: note = NK77.12_CD70_DB02_A06_CDR-L2
DASNLET

SEQ ID NO: 753 - protein, 7 aa, synthetic construct
  REGION 1..7: note = NK77.13_CD70_DB02_A07_CDR-L2
AASTLQS

SEQ ID NO: 754 - protein, 7 aa, synthetic construct
  REGION 1..7: note = NK77.14_CD70_DB02_A08_CDR-L2
DASNLET

SEQ ID NO: 755 - protein, 7 aa, synthetic construct
  REGION 1..7: note = NK77.15_CD70_DB02_A09_CDR-L2
DVSNLET

SEQ ID NO: 756 - protein, 7 aa, synthetic construct
  REGION 1..7: note = NK77.16_CD70_DB02_A11_CDR-L2
DASSLES

SEQ ID NO: 757 - protein, 7 aa, synthetic construct
  REGION 1..7: note = NK77.17_CD70_DB02_B06_CDR-L2
DASNLAT

SEQ ID NO: 758 - protein, 7 aa, synthetic construct
  REGION 1..7: note = NK77.18_CD70_DB02_B09_CDR-L2
GATTLQS

SEQ ID NO: 759 - protein, 7 aa, synthetic construct
  REGION 1..7: note = NK77.19_CD70_DB02_C03_CDR-L2
DASNLET

SEQ ID NO: 760 - protein, 7 aa, synthetic construct
  REGION 1..7: note = NK77.20_CD70_DB02_C04_CDR-L2
AASSLHS

SEQ ID NO: 761 - protein, 7 aa, synthetic construct
  REGION 1..7: note = NK77.22_CD70_DB02_C07_CDR-L2
AASSLQS

SEQ ID NO: 762 - protein, 7 aa, synthetic construct
  REGION 1..7: note = NK77.24_CD70_DB02_D02_CDR-L2
GASTRAT

SEQ ID NO: 763 - protein, 7 aa, synthetic construct
  REGION 1..7: note = NK77.25_CD70_DB02_D04_CDR-L2
AASTLES

SEQ ID NO: 764 - protein, 7 aa, synthetic construct
  REGION 1..7: note = NK77.26_CD70_DB02_D10_CDR-L2
DASSLES

SEQ ID NO: 765 - protein, 7 aa, synthetic construct
  REGION 1..7: note = NK77.27_CD70_DB02_D11_CDR-L2
DASNLET

SEQ ID NO: 766 - protein, 7 aa, synthetic construct
  REGION 1..7: note = NK77.28_CD70_DB02_E04_CDR-L2
DASSLQS

SEQ ID NO: 767 - protein, 7 aa, synthetic construct
  REGION 1..7: note = NK77.29_CD70_DB02_F06_CDR-L2
YASTLQS

SEQ ID NO: 768 - protein, 7 aa, synthetic construct
  REGION 1..7: note = NK77.31_CD70_DB02_F08_CDR-L2
DASTLEA

SEQ ID NO: 769 - protein, 7 aa, synthetic construct
  REGION 1..7: note = NK77.32_CD70_DB02_G07_CDR-L2
DASNLEI

SEQ ID NO: 770 - protein, 7 aa, synthetic construct
  REGION 1..7: note = NK77.33_CD70_DB02_H04_CDR-L2
AASSLQS

SEQ ID NO: 771 - protein, 7 aa, synthetic construct
  REGION 1..7: note = NK77.34_CD70_DB02_H05_CDR-L2
AASNLET

SEQ ID NO: 772 - protein, 7 aa, synthetic construct
  REGION 1..7: note = NK77.35_CD70_DB02_H08_CDR-L2
DASNLQT

SEQ ID NO: 773 - protein, 7 aa, synthetic construct
  REGION 1..7: note = NK77.36_CD70_DB03_A06_CDR-L2
SASSLQS

SEQ ID NO: 774 - protein, 7 aa, synthetic construct
  REGION 1..7: note = NK77.37_CD70_DB03_A07_CDR-L2
DASNLET

SEQ ID NO: 775 - protein, 7 aa, synthetic construct
  REGION 1..7: note = NK77.38_CD70_DB03_A08_CDR-L2
DASSLQS

SEQ ID NO: 776 - protein, 7 aa, synthetic construct
  REGION 1..7: note = NK77.39_CD70_DB03_A09_CDR-L2
GASTRAS

SEQ ID NO: 777 - protein, 7 aa, synthetic construct
  REGION 1..7: note = NK77.40_CD70_DB03_A11_CDR-L2
DASNLET

SEQ ID NO: 778 - protein, 7 aa, synthetic construct
  REGION 1..7: note = NK77.41_CD70_DB03_A12_CDR-L2
SASTLQS

SEQ ID NO: 779 - protein, 7 aa, synthetic construct
  REGION 1..7: note = NK77.42_CD70_DB03_B01_CDR-L2
AASSLQS

SEQ ID NO: 780 - protein, 7 aa, synthetic construct
  REGION 1..7: note = NK77.43_CD70_DB03_B04_CDR-L2
AASTLQS

SEQ ID NO: 781 - protein, 7 aa, synthetic construct
  REGION 1..7: note = NK77.44_CD70_DB03_B06_CDR-L2
GASTRAT

SEQ ID NO: 782 - protein, 7 aa, synthetic construct
  REGION 1..7: note = NK77.45_CD70_DB03_B09_CDR-L2
DASNLET

SEQ ID NO: 783 - protein, 7 aa, synthetic construct
  REGION 1..7: note = NK77.46_CD70_DB03_C05_CDR-L2
DASYLEA

SEQ ID NO: 784 - protein, 7 aa, synthetic construct
  REGION 1..7: note = NK77.47_CD70_DB03_D11_CDR-L2
WASTRDS

SEQ ID NO: 785 - protein, 7 aa, synthetic construct
  REGION 1..7: note = NK77.48_CD70_DB03_E01_CDR-L2
DASNLQR

SEQ ID NO: 786 - protein, 7 aa, synthetic construct
  REGION 1..7: note = NK77.49_CD70_DB03_E03_CDR-L2
DASSLQS

SEQ ID NO: 787 - protein, 7 aa, synthetic construct
  REGION 1..7: note = NK77.50_CD70_DB03_E09_CDR-L2
AASNLQG

SEQ ID NO: 788 - protein, 7 aa, synthetic construct
  REGION 1..7: note = NK77.51_CD70_DB03_F02_CDR-L2
DASNLER

SEQ ID NO: 789 - protein, 7 aa, synthetic construct
  REGION 1..7: note = NK77.52_CD70_DB03_F05_CDR-L2
AASSLQS

SEQ ID NO: 790 - protein, 7 aa, synthetic construct
  REGION 1..7: note = NK77.53_CD70_DB03_F06_CDR-L2
DASNLET

SEQ ID NO: 791 - protein, 7 aa, synthetic construct
  REGION 1..7: note = NK77.54_CD70_DB03_F09_CDR-L2
DASSLES

SEQ ID NO: 792 - protein, 7 aa, synthetic construct
  REGION 1..7: note = NK77.55_CD70_DB03_F12_CDR-L2
AASTLQS

SEQ ID NO: 793 - protein, 7 aa, synthetic construct
  REGION 1..7: note = NK77.56_CD70_DB03_G06_CDR-L2
DASNLET

SEQ ID NO: 794 - protein, 7 aa, synthetic construct
  REGION 1..7: note = NK77.57_CD70_DB03_G11_CDR-L2
DASNLET

SEQ ID NO: 795 - protein, 7 aa, synthetic construct
  REGION 1..7: note = NK77.58_CD70_DB03_H08_CDR-L2
AASTLQS

SEQ ID NO: 796 - protein, 7 aa, synthetic construct
  REGION 1..7: note = NK77.59_CD70_DB03_H10_CDR-L2
DASSLQS

SEQ ID NO: 797 - protein, 7 aa, synthetic construct
  REGION 1..7: note = NK77.60_CD70_DB04_A05_CDR-L2
DASNLET

SEQ ID NO: 798 - protein, 7 aa, synthetic construct
  REGION 1..7: note = NK77.61_CD70_DB04_A07_CDR-L2
DTSNLET

SEQ ID NO: 799 - protein, 7 aa, synthetic construct
  REGION 1..7: note = NK77.62_CD70_DB04_A10_CDR-L2
LGSTRAS

SEQ ID NO: 800 - protein, 7 aa, synthetic construct
  REGION 1..7: note = NK77.63_CD70_DB04_A11_CDR-L2
DTSNLQT

SEQ ID NO: 801 - protein, 7 aa, synthetic construct
  REGION 1..7: note = NK77.64_CD70_DB04_B03_CDR-L2
DASSLQS

SEQ ID NO: 802 - protein, 7 aa, synthetic construct
  REGION 1..7: note = NK77.65_CD70_DB04_B05_CDR-L2
DASNLET

SEQ ID NO: 803 - protein, 7 aa, synthetic construct
  REGION 1..7: note = NK77.66_CD70_DB04_B07_CDR-L2
HASNLET

SEQ ID NO: 804 - protein, 7 aa, synthetic construct
  REGION 1..7: note = NK77.67_CD70_DB04_C01_CDR-L2
DASNLET

SEQ ID NO: 805 - protein, 7 aa, synthetic construct
  REGION 1..7: note = NK77.68_CD70_DB04_C04_CDR-L2
DASNLET

SEQ ID NO: 806 - protein, 7 aa, synthetic construct
  REGION 1..7: note = NK77.69_CD70_DB04_C06_CDR-L2
DASNLET

SEQ ID NO: 807 - protein, 7 aa, synthetic construct
  REGION 1..7: note = NK77.70_CD70_DB04_C07_CDR-L2
GASSLQS

SEQ ID NO: 808 - protein, 7 aa, synthetic construct
  REGION 1..7: note = NK77.71_CD70_DB04_D02_CDR-L2
DASDLET

SEQ ID NO: 809 - protein, 7 aa, synthetic construct
  REGION 1..7: note = NK77.72_CD70_DB04_D05_CDR-L2
EVSNRAS

SEQ ID NO: 810 - protein, 7 aa, synthetic construct
  REGION 1..7: note = NK77.73_CD70_DB04_D07_CDR-L2
AASSLQS

SEQ ID NO: 811 - protein, 7 aa, synthetic construct
  REGION 1..7: note = NK77.74_CD70_DB04_D08_CDR-L2
DASNLET

SEQ ID NO: 812 - protein, 7 aa, synthetic construct
  REGION 1..7: note = NK77.75_CD70_DB04_D10_CDR-L2
AASSLQS

SEQ ID NO: 813 - protein, 7 aa, synthetic construct
  REGION 1..7: note = NK77.85_CD70_DB03_B02_CDR-L2
DASNLET

SEQ ID NO: 814 - protein, 7 aa, synthetic construct
  REGION 1..7: note = NK77.86_CD70_DB04_A06_CDR-L2
DASNLET

SEQ ID NO: 815 - protein, 7 aa, synthetic construct
  REGION 1..7: note = NK77.87_CD70_DB04_A09_CDR-L2
DASSLQS

SEQ ID NO: 816 - protein, 11 aa, synthetic construct [sequence omitted]

SEQ ID NO: 817 - protein, 11 aa, synthetic construct [sequence omitted]

SEQ ID NO: 818 - protein, 11 aa, synthetic construct [sequence omitted]

SEQ ID NO: 819 - protein, 11 aa, synthetic construct [sequence omitted]

SEQ ID NO: 820 - protein, 11 aa, synthetic construct [sequence omitted]

SEQ ID NO: 821 - protein, 11 aa, synthetic construct
  REGION 1..11: note = NK77.6_CD70_DB01_G07_CDR-L3
CQQAYRWPITF

SEQ ID NO: 822 - protein, 11 aa, synthetic construct [sequence omitted]

SEQ ID NO: 823 - protein, 11 aa, synthetic construct [sequence omitted]

SEQ ID NO: 824 - protein, 11 aa, synthetic construct [sequence omitted]

SEQ ID NO: 825 - protein, 10 aa, synthetic construct [sequence omitted]

SEQ ID NO: 826 - protein, 11 aa, synthetic construct
  REGION 1..11: note = NK77.12_CD70_DB02_A06_CDR-L3
CQQSYSTPPTF

SEQ ID NO: 827 - protein, 11 aa, synthetic construct [sequence omitted]

SEQ ID NO: 828 - protein, 11 aa, synthetic construct [sequence omitted]

SEQ ID NO: 829 - protein, 11 aa, synthetic construct [sequence omitted]

SEQ ID NO: 830 - protein, 11 aa, synthetic construct [sequence omitted]

SEQ ID NO: 831 - protein, 11 aa, synthetic construct [sequence omitted]

SEQ ID NO: 832 - protein, 11 aa, synthetic construct [sequence omitted]

SEQ ID NO: 833 - protein, 11 aa, synthetic construct [sequence omitted]

SEQ ID NO: 834 - protein, 11 aa, synthetic construct [sequence omitted]

SEQ ID NO: 835 - protein, 11 aa, synthetic construct [sequence omitted]

SEQ ID NO: 836 - protein, 11 aa, synthetic construct [sequence omitted]

SEQ ID NO: 837 - protein, 11 aa, synthetic construct [sequence omitted]

SEQ ID NO: 838 - protein, 11 aa, synthetic construct [sequence omitted]

SEQ ID NO: 839 - protein, 11 aa, synthetic construct [sequence omitted]

SEQ ID NO: 840 - protein, 11 aa, synthetic construct [sequence omitted]

SEQ ID NO: 841 - protein, 11 aa, synthetic construct [sequence omitted]

SEQ ID NO: 842 - protein, 11 aa, synthetic construct [sequence omitted]

SEQ ID NO: 843 - protein, 11 aa, synthetic construct [sequence omitted]

SEQ ID NO: 844 - protein, 11 aa, synthetic construct [sequence omitted]

SEQ ID NO: 845 - protein, 11 aa, synthetic construct [sequence omitted]

SEQ ID NO: 846 - protein, 11 aa, synthetic construct [sequence omitted]

SEQ ID NO: 847 - protein, 11 aa, synthetic construct [sequence omitted]

SEQ ID NO: 848 - protein, 11 aa, synthetic construct
  REGION 1..11: note = NK77.37_CD70_DB03_A07_CDR-L3
CQQNFSPPLTF

SEQ ID NO: 849 - protein, 11 aa, synthetic construct
  REGION 1..11: note = NK77.38_CD70_DB03_A08_CDR-L3
CQQTYDAPITF

SEQ ID NO: 850 - protein, 11 aa, synthetic construct [sequence omitted]

SEQ ID NO: 851 - protein, 11 aa, synthetic construct [sequence omitted]

SEQ ID NO: 852 - protein, 11 aa, synthetic construct [sequence omitted]

SEQ ID NO: 853 - protein, 11 aa, synthetic construct [sequence omitted]

SEQ ID NO: 854 - protein, 11 aa, synthetic construct [sequence omitted]

SEQ ID NO: 855 - protein, 10 aa, synthetic construct [sequence omitted]

SEQ ID NO: 856 - protein, 11 aa, synthetic construct [sequence omitted]

SEQ ID NO: 857 - protein, 11 aa, synthetic construct
  REGION 1..11: note = NK77.46_CD70_DB03_C05_CDR-L3
CQQSYSTPPTF

SEQ ID NO: 858 - protein, 11 aa, synthetic construct
  REGION 1..11: note = NK77.47_CD70_DB03_D11_CDR-L3
CQQYYGFPPTF

SEQ ID NO: 859 - protein, 11 aa, synthetic construct
  REGION 1..11: note = NK77.48_CD70_DB03_E01_CDR-L3
CQQTYSFPFTF

SEQ ID NO: 860 - protein, 11 aa, synthetic construct [sequence omitted]

SEQ ID NO: 861 - protein, 11 aa, synthetic construct
  REGION 1..11: note = NK77.50_CD70_DB03_E09_CDR-L3
CMQTLESPVTF

SEQ ID NO: 862 - protein, 11 aa, synthetic construct
  REGION 1..11: note = NK77.51_CD70_DB03_F02_CDR-L3
CQQSYDGPITF

SEQ ID NO: 863 - protein, 11 aa, synthetic construct [sequence omitted]

SEQ ID NO: 864 - protein, 11 aa, synthetic construct [sequence omitted]

SEQ ID NO: 865 - protein, 11 aa, synthetic construct [sequence omitted]

SEQ ID NO: 866 - protein, 11 aa, synthetic construct [sequence omitted]

SEQ ID NO: 867 - protein, 11 aa, synthetic construct [sequence omitted]

SEQ ID NO: 868 - protein, 11 aa, synthetic construct [sequence omitted]

SEQ ID NO: 869 - protein, 11 aa, synthetic construct [sequence omitted]

SEQ ID NO: 870 - protein, 11 aa, synthetic construct [sequence omitted]

SEQ ID NO: 871 - protein, 11 aa, synthetic construct [sequence omitted]

SEQ ID NO: 872 - protein, 11 aa, synthetic construct [sequence omitted]

SEQ ID NO: 873 - protein, 11 aa, synthetic construct
  REGION 1..11: note = NK77.62_CD70_DB04_A10_CDR-L3
CMQALDTPLTF

SEQ ID NO: 874 - protein, 11 aa, synthetic construct
  REGION 1..11: note = NK77.63_CD70_DB04_A11_CDR-L3
LSTDLQTTAHF

SEQ ID NO: 875 - protein, 11 aa, synthetic construct [sequence omitted]

SEQ ID NO: 876 - protein, 11 aa, synthetic construct
  REGION 1..11: note = NK77.65_CD70_DB04_B05_CDR-L3
CQQADSFPVTF

SEQ ID NO: 877 - protein, 11 aa, synthetic construct
  REGION 1..11: note = NK77.66_CD70_DB04_B07_CDR-L3
CQQSYDGPMTF

SEQ ID NO: 878 - protein, 11 aa, synthetic construct [sequence omitted]

SEQ ID NO: 879 - protein, 11 aa, synthetic construct
  REGION 1..11: note = NK77.68_CD70_DB04_C04_CDR-L3
CQQSYDGPITF

SEQ ID NO: 880 - protein, 11 aa, synthetic construct [sequence omitted]

SEQ ID NO: 881 - protein, 11 aa, synthetic construct
  REGION 1..11: note = NK77.70_CD70_DB04_C07_CDR-L3
CLQDAATPITF

SEQ ID NO: 882 - protein, 11 aa, synthetic construct [sequence omitted]

SEQ ID NO: 883 - protein, 11 aa, synthetic construct
  REGION 1..11: note = NK77.72_CD70_DB04_D05_CDR-L3
CMKGLQTPLTF

SEQ ID NO: 884 - protein, 11 aa, synthetic construct [sequence omitted]

SEQ ID NO: 885 - protein, 11 aa, synthetic construct [sequence omitted]

SEQ ID NO: 886 - protein, 11 aa, synthetic construct [sequence omitted]

SEQ ID NO: 887 - protein, 11 aa, synthetic construct [sequence omitted]

SEQ ID NO: 888 - protein, 11 aa, synthetic construct [sequence omitted]

SEQ ID NO: 889 - protein, 11 aa, synthetic construct [sequence omitted]

SEQ ID NO: 890 - protein, 118 aa, synthetic construct
  REGION 1..118: note = NK77.1_CD70_DB01_C03_VH
QVQLVQSGAEVKKPGASVKVSCKASGYTFTGHYLHWVRQAPGQGLEWMGWINPNSGGTNYAQKFQGRVTMTRDTSTSTVYMELSSLRSEDTAVYYCVRGSGWYDLDYWGQGTLVTVSS

SEQ ID NO: 891 - protein, 119 aa, synthetic construct
  REGION 1..119: note = NK77.2_CD70_DB01_D02_VH
QVQLVQSGAEVKKPGASVKVSCKASGYTFTNYYMHWVRQAPGQGLEWMGIINPSGGSTSYAQKFQGRVTMTRDTSTSTVYMELSSLRSEDTAVYYCARELGVAGYFDLWGRGTLVTVSS

SEQ ID NO: 892 - protein, 123 aa, synthetic construct
  REGION 1..123: note = NK77.3_CD70_DB01_E06_VH
QVQLVQSGAEVKKPGASVKVSCKASGYTFTGYYIHWVRQAPGQGLEWMGIINPSGGSTSYAQKFQGRVTMTRDTSTSTVYMELSSLRSEDTAVYYCARDLSGIDGYIGFFDYWGQGTLVTVSS

SEQ ID NO: 893 - protein, 119 aa, synthetic construct
  REGION 1..119: note = NK77.4_CD70_DB01_G04_VH
QVQLVQSGAEVKKPGASVKVSCKASGGTFRSHVISWVRQAPGQGLEWMGIIDPSGGSTSYAQRFQGRVTMTRDTSTSTVYMELSSLRSEDTAVYYCAKDYTGLLGMDVWGQGTTVTVSS

SEQ ID NO: 894 - protein, 119 aa, synthetic construct
  REGION 1..119: note = NK77.5_CD70_DB01_G05_VH
QVQLVQSGAEVKKPGASVKVSCKASGYTFIDYYIHWVRQAPGQGLEWMGWMNPNSGNTGYAQKFQGRVTMTRDTSTSTVYMELSSLRSEDTAVYYCARGLSGYDLDDYWGQGTLVTVSS

SEQ ID NO: 895 - protein, 118 aa, synthetic construct
  REGION 1..118: note = NK77.6_CD70_DB01_G07_VH
QVQLVQSGAEVKKPGASVKVSCKASGYTFTSYYMHWVRQAPGQGLEWMGWINPNSGGTKYAHKFQGRVTMTRDTSTSTVYMELSSLRSEDTAVYYCARGLSGYDFDYWGQGTTVTVSS

SEQ ID NO: 896 - protein, 119 aa, synthetic construct
  REGION 1..119: note = NK77.7_CD70_DB01_G11_VH
QVQLVQSGAEVKKPGASVKVSCKASGYTFTGYYMHWVRQAPGQGLEWMGWMNPNSGNTGYAQKFQGRVTMTRDTSTSTVYMELSSLRSEDTAVYYCARGTDVYGDFDYWGQGTLVTVSS

SEQ ID NO: 897 - protein, 126 aa, synthetic construct
  REGION 1..126: note = NK77.9_CD70_DB02_A03_VH
QVQLVQSGAEVKKPGSSVKVSCKASGYTFTENEMHWVRQAPGQGLEWMGGIIPIFGTANYAQKFQGRVTITADESTSTAYMELSSLRSEDTAVYYCAREGGTAMATGYYYYGMDVWGQGTTVTVSS

SEQ ID NO: 898 - protein, 119 aa, synthetic construct
  REGION 1..119: note = NK77.10_CD70_DB02_A04_VH
QVQLVQSGAEVKKPGASVKVSCKASGYTFTENEMHWVRQAPGQGLEWMGWINSNGGYTGYALKFQGRVTMTRDTSTSTVYMELSSLRSEDTAVYYCARASNYGGHFDYWGQGTLVTVSS

SEQ ID NO: 899 - protein, 120 aa, synthetic construct
  REGION 1..120: note = NK77.11_CD70_DB02_A05_VH
QVQLVQSGAEVKKPGASVKVSCKASGYTFTSYYMHWVRQAPGQGLEWMGIINPSGGSTIYAQKFQGRVTMTRDTSTSTVYMELSSLRSEDTAVYYCAKDMGAWAAGFDYWGQGTLVTVSS

SEQ ID NO: 900 - protein, 120 aa, synthetic construct
  REGION 1..120: note = NK77.12_CD70_DB02_A06_VH
QVQLVQSGAEVKKPGASVKVSCKASGYTFTGYYMHWVRQAPGQGLEWMGWINPNSGDTGYAQKFQGRVTMTRDTSTSTVYMELSSLRSEDTAVYYCARSVNDYGDYDGYWGQGTLVTVSS

SEQ ID NO: 901 - protein, 120 aa, synthetic construct
  REGION 1..120: note = NK77.13_CD70_DB02_A07_VH
QVQLVQSGAEVKKPGASVKVSCKASGYTFTGYYMHWVRQAPGQGLEWMGIINPSGGSTSYAQKFQGRVTMTRDTSTSTVYMELSSLRSEDTAVYYCARDYGDYDASFDYWGQGTLVTVSS

SEQ ID NO: 902 - protein, 117 aa, synthetic construct
  REGION 1..117: note = NK77.14_CD70_DB02_A08_VH
QVQLVQSGAEVKKPGASVKVSCKASGYTFTSYDINWVRQAPGQGLEWMGIINPSDGSTIYAQNFQGRVTMTRDTSTSTVYMELSSLRSEDTAVYYCVKEEAWYFDLWGRGTLVTVSS

SEQ ID NO: 903 - protein, 117 aa, synthetic construct
  REGION 1..117: note = NK77.15_CD70_DB02_A09_VH
QVQLVQSGAEVKKPGASVKVSCKASGYTFTSYYMHWVRQAPGQGLEWMGWMNPDNGDTGYAQMFQGRVTMTRDTSTSTVYMELSSLRSEDTAVYYCASGDYYDILYWGQGTLVTVSS

SEQ ID NO: 904 - protein, 118 aa, synthetic construct
  REGION 1..118: note = NK77.16_CD70_DB02_A11_VH
QVQLVQSGAEVKKPGASVKVSCKASGYTFTSYYMHWVRQAPGQGLEWMGWMNPNSGDTGYAQKFQGRVTMTRDTSTSTVYMELSSLRSEDTAVYYCARGPSGYEFDYWGQGTLVTVSS

SEQ ID NO: 905 - protein, 122 aa, synthetic construct
  REGION 1..122: note = NK77.17_CD70_DB02_B06_VH
QVQLVQSGAEVKKPGASVKVSCKASGYTFTDYYMHWVRQAPGQGLEWMGIINPNSGGTNYAQKFQGRVTMTRDTSTSTVYMELSSLRSEDTAVYYCARDFSVYAAADGMDVWGQGTLVTVSS

SEQ ID NO: 906 - protein, 121 aa, synthetic construct
  REGION 1..121: note = NK77.18_CD70_DB02_B09_VH
QVQLVQSGAEVKKPGASVKVSCKASGYTFTGYYMHWVRQAPGQGLEWMGIINPGDGGTIYAQNFQGRVTMTRDTSTSTVYMELSSLRSEDTAVYYCARGFGESAPDAFDIWGQGTMVTVSS

SEQ ID NO: 907 - protein, 118 aa, synthetic construct
  REGION 1..118: note = NK77.19_CD70_DB02_C03_VH
QVQLVQSGAEVKKPGASVKVSCKASGYTFTGYYMHWVRQAPGQGLEWMGIINPSGGSTSYAQKFQGRVTMTRDTSTSTVYMELSSLRSEDTAVYYCAAGTEIYYMDVWGKGTTVTVSS

SEQ ID NO: 908 - protein, 127 aa, synthetic construct
  REGION 1..127: note = NK77.20_CD70_DB02_C04_VH
QVQLVQSGAEVKKPGASVKVSCKASGGTFSSYAISWVRQAPGQGLEWMGMINPSDGATTYAQKFQGRVTMTRDTSTSTVYMELSSLRSEDTAVYYCARERELLHFATNYYYYGMDVWGQGTTVTVSS

SEQ ID NO: 909 - protein, 123 aa, synthetic construct
  REGION 1..123: note = NK77.22_CD70_DB02_C07_VH
QVQLVQSGAEVKKPGASVKVSCKASGYTFTRNYMHWVRQAPGQGLEWMGWISPDNGVTNYAQNFQGRVTMTRDTSTSTVYMELSSLRSEDTAVYYCAKTQGSSSWYQWYFDLWGRGTLVTVSS

SEQ ID NO: 910 - protein, 119 aa, synthetic construct
  REGION 1..119: note = NK77.24_CD70_DB02_D02_VH
QVQLVQSGAEVKKPGASVKVSCKASGYTFTSYYMHWVRQAPGQGLEWMGIIDPGSGDTSYAQKFQGRVTMTRDTSTSTVYMELSSLRSEDTAVYYCARGSNWYDYFDYWGQGTLVTVSS

SEQ ID NO: 911 - protein, 119 aa, synthetic construct
  REGION 1..119: note = NK77.25_CD70_DB02_D04_VH
QVQLVQSGAEVKKPGASVKVSCKASGYRLSDHYMHWVRQAPGQGLEWMGIINPSGGSTTYAQNFQGRVTMTRDTSTSTVYMELSSLRSEDTAVYYCASSYYGDYVLVNWGQGTLVTVSS

SEQ ID NO: 912 - protein, 120 aa, synthetic construct
  REGION 1..120: note = NK77.26_CD70_DB02_D10_VH
QVQLVQSGAEVKKPGASVKVSCKASGYTFTDYYVHWVRQAPGQGLEWMGWINPNTGGTSFAQNFQGRVTMTRDTSTSTVYMELSSLRSEDTAVYYCARDLGQWLGEIDYWGQGTLVTVSS

SEQ ID NO: 913 - protein, 124 aa, synthetic construct
  REGION 1..124: note = NK77.27_CD70_DB02_D11_VH
QVQLVQSGAEVKKPGASVKVSCKASGYTFTDYTDYFVHWVRQAPGQGLEWMGIFNPSDGSTSYAQEFQGRVTMTRDTSTSTVYMELSSLRSEDTAVYYCARGPYSSSWYYFDYWGQGTLVTVSS

SEQ ID NO: 914 - protein, 120 aa, synthetic construct
  REGION 1..120: note = NK77.28_CD70_DB02_E04_VH
QVQLVQSGAEVKKPGASVKVSCKASGYIFTDYYMHWVRQAPGQGLEWMGIINPSGGDTLYAQKFQGRVTMTRDTSTSTVYMELSSLRSEDTAVYYCAREGVGAMGVFDYWGQGTLVTVSS

SEQ ID NO: 915 - protein, 122 aa, synthetic construct
  REGION 1..122: note = NK77.29_CD70_DB02_F06_VH
QVQLVQSGAEVKKPGASVKVSCKASGYTFTDHYIHWVRQAPGQGLEWMGWISAYNGKTNYAQKFQGRVTMTRDTSTSTVYMELSSLRSEDTAVYYCARDTIYYDFWSGYDYWGQGTLVTVSS

SEQ ID NO: 916 - protein, 122 aa, synthetic construct
  REGION 1..122: note = NK77.31_CD70_DB02_F08_VH
QVQLVQSGAEVKKPGASVKVSCKASGYTFTSYYMHWVRQAPGQGLEWMGIINPSGGATIYAQKFQGRVTMTRDTSTSTVYMELSSLRSEDTAVYYCARSRGDYYGSGDFDYWGQGTLVTVSS

SEQ ID NO: 917 - protein, 118 aa, synthetic construct
  REGION 1..118: note = NK77.32_CD70_DB02_G07_VH
QVQLVQSGAEVKKPGASVKVSCKASGYTFTDYYMHWVRQAPGQGLEWMGIINPSGGSTSYAQKFQGRVTMTRDTSTSTVYMELSSLRSEDTAVYYCARGYFDHAFDIWGQGTMVTVSS

SEQ ID NO: 918 - protein, 124 aa, synthetic construct
  REGION 1..124: note = NK77.33_CD70_DB02_H04_VH
QVQLVQSGAEVKKPGASVKVSCKASGYTFTGYYMHWVRQAPGQGLEWMGIINPSGGDTIYAQKFQGRVTMTRDTSTSTVYMELSSLRSEDTAVYYCARGDSSSWYDYYYYMDVWGKGTTVTVSS

SEQ ID NO: 919 - protein, 119 aa, synthetic construct
  REGION 1..119: note = NK77.34_CD70_DB02_H05_VH
QVQLVQSGAEVKKPGASVKVSCKASGYTFTDYFTHWVRQAPGQGLEWMGWINTYDGNTNYAQKFQGRVTMTRDTSTSTVYMELSSLRSEDTAVYYCAREMEWLGQVDYWGQGTLVTVSS

SEQ ID NO: 920 - protein, 119 aa, synthetic construct
  REGION 1..119: note = NK77.35_CD70_DB02_H08_VH
QVQLVQSGAEVKKPGASVKVSCKASGYTFTSYYIHWVRQAPGQGLEWMGRINPNGGGTNYAQKFQGRVTMTRDTSTSTVYMELSSLRSEDTAVYYCARGHRGGGGIDYWGQGTLVTVSS

SEQ ID NO: 921 - protein, 119 aa, synthetic construct
  REGION 1..119: note = NK77.36_CD70_DB03_A06_VH
QVQLVQSGAEVKKPGASVKVSCKASGGTFSSYAISWVRQAPGQGLEWMGWISPNSGDTHYAQKFQGRVTMTRDTSTSTVYMELSSLRSEDTAVYYCARDWGSGWYVDYWGQGTLVTVSS

SEQ ID NO: 922 - protein, 119 aa, synthetic construct
  REGION 1..119: note = NK77.37_CD70_DB03_A07_VH
QVQLVQSGAEVKKPGSSVKVSCKASGGTFNSYGISWVRQAPGQGLEWMGGIIPIFGTANYAQKFQGRVTITADESTSTAYMELSSLRSEDTAVYYCARDTYGDDAFDIWGQGTMVTVSS

SEQ ID NO: 923 - protein, 124 aa, synthetic construct
  REGION 1..124: note = NK77.38_CD70_DB03_A08_VH
QVQLVQSGAEVKKPGASVKVSCKASGYSFTSYYMHWVRQAPGQGLEWMGIINPSGGTTSYAQKFQGRVTMTRDTSTSTVYMELSSLRSEDTAVYYCARDNSPYSSSWWDYFDYWGQGTLVTVSS

SEQ ID NO: 924 - protein, 122 aa, synthetic construct
  REGION 1..122: note = NK77.39_CD70_DB03_A09_VH
QVQLVQSGAEVKKPGASVKVSCKASGYTFTDYYIHWVRQAPGQGLEWMGWITPNSGYTYYAQNFQGRVTMTRDTSTSTVYMELSSLRSEDTAVYYCARNTDCYGDFLGLDVWGQGTTVTVSS

SEQ ID NO: 925 - protein, 122 aa, synthetic construct
  REGION 1..122: note = NK77.40_CD70_DB03_A11_VH
QVQLVQSGAEVKKPGASVKVSCKASGYTFNGYLMHWVRQAPGQGLEWMGIVNPSDGSTGYAQKFQGRVTMTRDTSTSTVYMELSSLRSEDTAVYYCAKDTGLRYFDWLLDYWGQGTLVTVSS

SEQ ID NO: 926 - protein, 118 aa, synthetic construct
  REGION 1..118: note = NK77.41_CD70_DB03_A12_VH
QVQLVQSGAEVKKPGASVKVSCKASGYTFTSYYMHWVRQAPGQGLEWMGIIDPSGGRTIYAQRFQGRVTMTRDTSTSTVYMELSSLRSEDTAVYYCARHEAGGIFDYWGQGTLVTVSS

SEQ ID NO: 927 - protein, 121 aa, synthetic construct
  REGION 1..121: note = NK77.42_CD70_DB03_B01_VH
QVQLVQSGAEVKKPGSSVKVSCKASGYTFSDSYMHWVRQAPGQGLEWVGGIIPMAGIPAYAEEFQGRVTITADESTSTAYMELSSLRSEDTAVYYCARADDYGGNWYFDLWGRGTLVTVSS

SEQ ID NO: 928 - protein, 120 aa, synthetic construct
  REGION 1..120: note = NK77.43_CD70_DB03_B04_VH
QVQLVQSGAEVKKPGASVKVSCKASGYIFTDYYMHWVRQAPGQGLEWMGIINPSGGSTSYAQKFQGRVTMTRDTSTSTVYMELSSLRSEDTAVYYCARDSGWYESWFDPWGQGTLVTVSS

SEQ ID NO: 929 - protein, 122 aa, synthetic construct
  REGION 1..122: note = NK77.44_CD70_DB03_B06_VH
QVQLVQSGAEVKKPGASVKVSCKASGYTFTDYYLHWVRQAPGQGLEWMGWISAYNGNTNYAQKFQGRVTMTRDTSTSTVYMELSSLRSEDTAVYYCAREIVGATEDWYFDLWGRGTLVTVSS

SEQ ID NO: 930 - protein, 119 aa, synthetic construct
  REGION 1..119: note = NK77.45_CD70_DB03_B09_VH
QVQLVQSGAEVKKPGASVKVSCKASGYTFTAYYLHWVRQAPGQGLEWMGMINPNNGGTIYAQTFQGRVTMTRDTSTSTVYMELSSLRSEDTAVYYCARDLGGYVLFDYWGQGTLVTVSS

SEQ ID NO: 931 - protein, 119 aa, synthetic construct
  REGION 1..119: note = NK77.46_CD70_DB03_C05_VH
QVQLVQSGAEVKKPGASVKVSCKASGYTFTDYYIHWVRQAPGQGLEWMGMINPRGGSTTYAQSFQGRVTMTRDTSTSTVYMELSSLRSEDTAVYYCARDLGDYGDYDYWGQGTLVTVSS

SEQ ID NO: 932 - protein, 124 aa, synthetic construct
  REGION 1..124: note = NK77.47_CD70_DB03_D11_VH
EVQLLESGGGLVQPGGSLRLSCAASGFTFSNSDMNWVRQAPGKGLEWVSAISGGGDTLYYADSVKGRFTISRDNSKNTLYLQMNSLRAEDTAVYYCAMASALDSSGDNEAFDIWGQGTTVTVSS

SEQ ID NO: 933 - protein, 122 aa, synthetic construct
  REGION 1..122: note = NK77.48_CD70_DB03_E01_VH
QVQLVQSGAEVKKPGASVKVSCKASGYTFTSYYMHWVRQAPGQGLEWMGWINPNNGGTSYAQKFQGRVTMTRDTSTSTVYMELSSLRSEDTAVYYCARVEDDFWSGPSFDYWGQGTLVTVSS

SEQ ID NO: 934 - protein, 119 aa, synthetic construct
  REGION 1..119: note = NK77.49_CD70_DB03_E03_VH
QVQLVQSGAEVKKPGSSVKVSCKASGGTFTNYAFSWVRQAPGQGLEWMGGIIPISGAANYAQKFQGRVTITADESTSTAYMELSSLRSEDTAVYYCARGSGLDDAFDIWGQGTMVTVSS

SEQ ID NO: 935 - protein, 129 aa, synthetic construct
  REGION 1..129: note = NK77.50_CD70_DB03_E09_VH
QVQLVQSGAEVKKPGASVKVSCKASGYTFTAYYMHWVRQAPGQGLEWMGWMNPNSGNTGYAQKFQGRVTMTRDTSTSTVYMELSSLRSEDTAVYYCAREGRIDYGDYDDYYYYYGMDVWGQGTTVTVSS

SEQ ID NO: 936 - protein, 120 aa, synthetic construct
  REGION 1..120: note = NK77.51_CD70_DB03_F02_VH
QVQLVQSGAEVKKPGASVKVSCKASGYTFTDYYVHWVRQAPGQGLEWMGTINPSGGSTSYAQKFQGRVTMTRDTSTSTVYMELSSLRSEDTAVYYCARDQGLWFTGFDYWGQGTLVTVSS

SEQ ID NO: 937 - protein, 120 aa, synthetic construct
  REGION 1..120: note = NK77.52_CD70_DB03_F05_VH
QVQLVQSGAEVKKPGASVKVSCKASGYTFTAYHMHWVRQAPGQGLEWMGIINPGDGATGYAQNLQGRVTMTRDTSTSTVYMELSSLRSEDTAVYYCAGEGISGSDAFDIWGQGTLVTVSS

SEQ ID NO: 938 - protein, 118 aa, synthetic construct
  REGION 1..118: note = NK77.53_CD70_DB03_F06_VH
QVQLVQSGAEVKKPGSSVKVSCKASGGTFSSYAISWVRQAPGQGLEWMGWMNPNSGNTGYAQKFQGRVTITADESTSTAYMELSSLRSEDTAVYYCAWGVDPYYFDYWGQGTLVTVSS

SEQ ID NO: 939 - protein, 118 aa, synthetic construct
  REGION 1..118: note = NK77.54_CD70_DB03_F09_VH
QVQLVQSGAEVKKPGASVKVSCKASGYTFTSYYMHWVRQAPGQGLEWMGIFNPSDGSTSYAQKFQGRVTMTRDTSTSTVYMELSSLRSEDTAVYYCARDVGETTFDPWGQGTLVTVSS

SEQ ID NO: 940 - protein, 123 aa, synthetic construct
  REGION 1..123: note = NK77.55_CD70_DB03_F12_VH
QVQLVQSGAEVKKPGASVKVSCKASGYTFTSYGISWVRQAPGQGLEWMGWISAYNGHTNYAQKFQGRVTMTRDTSTSTVYMELSSLRSEDTAVYYCARDSVRGWDYYYGMGVWGQGTTVTVSS

SEQ ID NO: 941 - protein, 120 aa, synthetic construct
  REGION 1..120: note = NK77.56_CD70_DB03_G06_VH
QVQLVQSGAEVKKPGSSVKVSCKASGYTFIDYYMHWVRQAPGQGLEWMGWMNPHSGNSDNAPKFQGRVTITADESTSTAYMELSSLRSEDTAVYYCARGYSGYDLTADYWGQGTLVTVSS

SEQ ID NO: 942 - protein, 129 aa, synthetic construct
  REGION 1..129: note = NK77.57_CD70_DB03_G11_VH
QVQLVQSGAEVKKPGASVKVSCKASGYTFTGQYMHWVRQAPGQGLEWMGWINPNTGDTNYAQKFQGRVTMTRDTSTSTVYMELSSLRSEDTAVYYCARDSVFEVEGGTDYYYYYGMDVWGQGTMVTVSS

SEQ ID NO: 943 - protein, 119 aa, synthetic construct
  REGION 1..119: note = NK77.58_CD70_DB03_H08_VH
QVQLVQSGAEVKKPGASVKVSCKASGYTFTSYDINWVRQAPGQGLEWMGVINPSGGGTSYAQKFQGRVTMTRDTSTSTVYMELSSLRSEDTAVYYCARYSGYDWVFDYWGQGTLVTVSS

SEQ ID NO: 944 - protein, 120 aa, synthetic construct
  REGION 1..120: note = NK77.59_CD70_DB03_H10_VH
QVQLVQSGAEVKKPGASVKVSCKASGYTFANYYMHWVRQAPGQGLEWMGIINPSGGSTSYAQKFQGRVTMTRDTSTSTVYMELSSLRSEDTAVYYCARDSGSYFGWFDPWGQGTLVTVSS

SEQ ID NO: 945 - protein, 120 aa, synthetic construct
  REGION 1..120: note = NK77.60_CD70_DB04_A05_VH
QVQLVQSGAEVKKPGASVKVSCKASGYTFTTYYMHWVRQAPGQGLEWMGIINPTGGSTYYAQKFQGRVTMTRDTSTSTVYMELSSLRSEDTAVYYCARDSGNYQGIFDYWGQGTLVTVSS

SEQ ID NO: 946 - protein, 119 aa, synthetic construct
  REGION 1..119: note = NK77.61_CD70_DB04_A07_VH
QVQLVQSGAEVKKPGASVKVSCKASGNTFTSYYMHWVRQAPGQGLEWMGWINPNSGDTNYAQNFQGRVTMTRDTSTSTVYMELSSLRSEDTAVYYCARGVSGYDLFDYWGQGTLVTVSS

SEQ ID NO: 947 - protein, 114 aa, synthetic construct
  REGION 1..114: note = NK77.62_CD70_DB04_A10_VH
EVQLVESGGGLVKPGGSLRLSCAASGFTFSSYGMHWVRQAPGKGLEWVASIKHDGSEQYYVDSVKGRFTISRDDSKNTLYLQMNSLKTEDTAVYYCAASGVDVWGQGTTVTVSS

SEQ ID NO: 948 - protein, 122 aa, synthetic construct
  REGION 1..122: note = NK77.63_CD70_DB04_A11_VH
QVQLVQSGAEVKKPGASVKVSCKASGGTFSRYDINWVRQAPGQGLEWVGIIDPTGASTSYAQKFQGRVTMTRDTSTSTVYMELSSLRSEDTAVYYCARDYSYGMDYYGMDVWGQGTLVTVSS

SEQ ID NO: 949 - protein, 119 aa, synthetic construct
  REGION 1..119: note = NK77.64_CD70_DB04_B03_VH
QVQLVQSGAEVKKPGSSVKVSCKASGYTFTSYGISWVRQAPGQGLEWMGGIIPIFGTTNYAQKFQGRVTITADESTSTAYMELSSLRSEDTAVYYCARDHSGDGYFDLWGRGTLVTVSS

SEQ ID NO: 950 - protein, 118 aa, synthetic construct
  REGION 1..118: note = NK77.65_CD70_DB04_B05_VH
QVQLVQSGAEVKKPGASVKVSCKASGYTFTENEMHWVRQAPGQGLEWMGWINPNSGGTNYAQKFQGRVTMTRDTSTSTVYMELSSLRSEDTAVYYCAGSWGGYYFDYWGQGTLVTVSS

SEQ ID NO: 951 - protein, 121 aa, synthetic construct
  REGION 1..121: note = NK77.66_CD70_DB04_B07_VH
QVQLVQSGAEVKKPGASVKVSCKASGYTFTNYYIYWVRQAPGQGLEWMGWINPNDGATNYAQKFQGRVTMTRDTSTSTVYMELSSLRSEDTAVYYCAREGNDYYYYFMDYWGQGTLVTVSS

SEQ ID NO: 952 - protein, 122 aa, synthetic construct
  REGION 1..122: note = NK77.67_CD70_DB04_C01_VH
QVQLVQSGAEVKKPGSSVKVSCKASGGTFSSYAISWVRQAPGQGLEWMGGITPMFGTTDYAQKFQGRVTITADESTSTAYMELSSLRSEDTAVYYCARDERDGYATVAFDIWGQGTMVTVSS

SEQ ID NO: 953 - protein, 122 aa, synthetic construct
  REGION 1..122: note = NK77.68_CD70_DB04_C04_VH
QVQLVQSGAEVKKPGASVKVSCKASGYTFTSYYMHWVRQAPGQGLEWMGIINPSDGGTSYADKFQGRVTMTRDTSTSTVYMELSSLRSEDTAVYYCARALAPLGWGDGMDVWGQGTTVTVSS

SEQ ID NO: 954 - protein, 119 aa, synthetic construct
  REGION 1..119: note = NK77.69_CD70_DB04_C06_VH
QVQLVQSGAEVKKPGSSVKVSCKASGYTFTSYYIHWVRQAPGQGLEWMGWMNPSSGVTNFAQKFQGRVTITADESTSTAYMELSSLRSEDTAVYYCARGSDQGDWSDPWGQGTLVTVSS

SEQ ID NO: 955 - protein, 122 aa, synthetic construct
  REGION 1..122: note = NK77.70_CD70_DB04_C07_VH
QVQLVQSGAEVKKPGASVKVSCKASGYTFTDSYIHWVRQAPGQGLEWIGWMNPNTGDTGYAQKFQGRVTMTRDTSTSTVYMELSSLRSEDTAVYYCAKDDFGELAPATFDPWGQGTLVTVSS

SEQ ID NO: 956 - protein, 122 aa, synthetic construct
  REGION 1..122: note = NK77.71_CD70_DB04_D02_VH
QVQLVQSGAEVKKPGASVKVSCKASGYTFTSYDINWVRQAPGQGLEWMGVISPSGGGTSYAQKFQGRVTMTRDTSTSTVYMELSSLRSEDTAVYYCARYYGGNPEGWYFDLWGRGTLVTVSS

SEQ ID NO: 957 - protein, 132 aa, synthetic construct
  REGION 1..132: note = NK77.72_CD70_DB04_D05_VH
EVQLLESGGGLVQPGGSLRLSCAASGFVFDDYAIHWVRQAPGKGLEWVAAISYDGSNKYYADSVKGRFTISRDNSKNTLYLQMNSLRAEDTAVYYCARAPQYYGSGTDPLEVRYYYYGMDVWGQGTTVTVSS

SEQ ID NO: 958 - protein, 122 aa, synthetic construct
  REGION 1..122: note = NK77.73_CD70_DB04_D07_VH
QVQLVQSGAEVKKPGSSVKVSCKASGGTFRNYAISWVRQAPGQGLEWMGGIIPIFGTANYAQKFQGRVTITADESTSTAYMELSSLRSEDTAVYYCARDHSAGTHHDAFDIWGQGTMVTVSS

SEQ ID NO: 959 - protein, 117 aa, synthetic construct
  REGION 1..117: note = NK77.74_CD70_DB04_D08_VH
QVQLVQSGAEVKKPGASVKVSCKASGYTFTSYYIHWVRQAPGQGLEWMGWMNPNSGNAGYAQKFQGRVTMTRDTSTSTVYMELSSLRSEDTAVYYCAREYWGSFDYWGQGTLVTVSS

SEQ ID NO: 960 - protein, 118 aa, synthetic construct
  REGION 1..118: note = NK77.75_CD70_DB04_D10_VH
QVQLVQSGAEVKKPGASVKVSCKASGYTFTGYYMHWVRQAPGQGLEWMGMIDPSDGSTIYAQKFQGRVTMTRDTSTSTVYMELSSLRSEDTAVYYCARERPLYASDLWGQGTLVTVSS

SEQ ID NO: 961 - protein, 119 aa, synthetic construct
  REGION 1..119: note = NK77.85_CD70_DB03_B02_VH
QVQLVQSGAEVKKPGSSVKVSCKASGYTFTNYYMHWVRQAPGQGLEWMGWMNPDSGNTGYAQKFQGRVTITADESTSTAYMELSSLRSEDTAVYYCARSSSSWPDFDLWGRGTLVTVSS

SEQ ID NO: 962 - protein, 120 aa, synthetic construct
  REGION 1..120: note = NK77.86_CD70_DB04_A06_VH
QVQLVQSGAEVKKPGASVKVSCKASGYTFTSYSMHWVRQAPGQGLEWVGIINPSSGSASYAQKFQGRVTMTRDTSTSTVYMELSSLRSEDTAVYYCARERGAYSSTFDYWGQGTLVTVSS

SEQ ID NO: 963 - protein, 120 aa, synthetic construct
  REGION 1..120: note = NK77.87_CD70_DB04_A09_VH
QVQLVQSGAEVKKPGASVKVSCKASGYTFTDYYMHWVRQAPGQGLEWMGVINPSDGTAHYAQRLQGRVTMTRDTSTSTVYMELSSLRSEDTAVYYCARDSGSYYADFDYWGQGTLVTVSS

SEQ ID NO: 964 - protein, 108 aa, synthetic construct
  REGION 1..108: note = NK77.1_CD70_DB01_C03_VL
DIQMTQSPSSLSASVGDRVTITCRASQNIGTYLAWYQQKPGKAPKLLIYDASNLETGVPSRFSGSGSGTDFTLTISSLQPEDFATYYCQQSYRIPLTFGQGTRLEIKR

SEQ ID NO: 965 - protein, 108 aa, synthetic construct
  REGION 1..108: note = NK77.2_CD70_DB01_D02_VL
DIQMTQSPSSLSASVGDRVTITCRASQRISNWLAWYQQKPGKAPKLLIYDASNLETGVPSRFSGSGSGTDFTLTISSLQPEDFATYYCQQTYSPPPTFGQGTKLEIKR

SEQ ID NO: 966 - protein, 113 aa, synthetic construct
  REGION 1..113: note = NK77.3_CD70_DB01_E06_VL
DIVMTQSPLSLPVTPGEPASISCRSSQSLLHSNGYNYLDWYLQKPGQSPQLLIYAASSLQSGVPDRFSGSGSGTDFTLKISRVEAEDVGVYYCMQALQTPITFGQGTRLEIKR

SEQ ID NO: 967 - protein, 108 aa, synthetic construct
  REGION 1..108: note = NK77.4_CD70_DB01_G04_VL
DIQMTQSPSSLSASVGDRVTITCRASQDIDTYLAWYQQKPGKAPKLLIYAASSLQSGVPSRFSGSGSGTDFTLTISSLQPEDFATYYCQQSYTTPFTFGQGTKVEIKR

SEQ ID NO: 968 - protein, 108 aa, synthetic construct
  REGION 1..108: note = NK77.5_CD70_DB01_G05_VL
DIQMTQSPSSLSASVGDRVTITCQASQDISNYLNWYQQKPGKAPKLLIYDASSLESGVPSRFSGSGSGTDFTLTISSLQPEDFATYYCQQSYRSPLTFGGGTKVEIKR

SEQ ID NO: 969 - protein, 108 aa, synthetic construct
  REGION 1..108: note = NK77.6_CD70_DB01_G07_VL
DIQMTQSPSSLSASVGDRVTITCQASQDISNYLNWYQQKPGKAPKLLIYDASNLETGVPSRFSGSGSGTDFTLTISSLQPEDFATYYCQQAYRWPITFGQGTRLEIKR

SEQ ID NO: 970 - protein, 108 aa, synthetic construct
  REGION 1..108: note = NK77.7_CD70_DB01_G11_VL
DIQMTQSPSSLSASVGDRVTITCRASQSISSYLNWYQQKPGKAPKLLIYDASYLETGVPSRFSGSGSGTDFTLTISSLQPEDFATYYCQQSYTIPPTFGQGTKVEIKR

SEQ ID NO: 971 - protein, 108 aa, synthetic construct
  REGION 1..108: note = NK77.9_CD70_DB02_A03_VL
DIQMTQSPSSLSASVGDRVTITCQASQDISNYLNWYQQKPGKAPKLLIYDASNLETGVPSRFSGSGSGTDFTLTISSLQPEDFATYYCQQSYSTPLTFGQGTKVEIKR

SEQ ID NO: 972 - protein, 113 aa, synthetic construct
  REGION 1..113: note = NK77.10_CD70_DB02_A04_VL
DIVMTQSPLSLPVTPGEPASISCRSSQSLLHSNGYNYLDWYLQKPGQSPQLLIYQASSLESGVPDRFSGSGSGTDFTLKISRVEAEDVGVYYCMQGTHWPPTFGGGTKVEIKR

SEQ ID NO: 973 - protein, 107 aa, synthetic construct
  REGION 1..107: note = NK77.11_CD70_DB02_A05_VL
DIQMTQSPSSLSASVGDRVTITCQASQDISNYLNWYQQKPGKAPKLLIYATSTLANGVPSRFSGSGSGTDFTLTISSLQPEDFATYYCQQSYSTLTFGQGTRLEIKR

SEQ ID NO: 974 - protein, 108 aa, synthetic construct
  REGION 1..108: note = NK77.12_CD70_DB02_A06_VL
DIQMTQSPSSLSASVGDRVTITCQASQDISNYLNWYQQKPGKAPKLLIYDASNLETGVPSRFSGSGSGTDFTLTISSLQPEDFATYYCQQSYSTPPTFGQGTKVEIKR

SEQ ID NO: 975 - protein, 108 aa, synthetic construct
  REGION 1..108: note = NK77.13_CD70_DB02_A07_VL
DIQMTQSPSSLSASVGDRVTITCRASQSIDNWLAWYQQKPGKAPKLLIYAASTLQSGVPSRFSGSGSGTDFTLTISSLQPEDFATYYCQQSYDSPPTFGQGTKLEIKR

SEQ ID NO: 976 - protein, 108 aa, synthetic construct
  REGION 1..108: note = NK77.14_CD70_DB02_A08_VL
DIQMTQSPSSLSASVGDRVTITCQASQDISNYLNWYQQKPGKAPKLLIYDASNLETGVPSRFSGSGSGTDFTLTISSLQPEDFATYYCQQSYSTPLTFGGGTKVEIKR

SEQ ID NO: 977 - protein, 108 aa, synthetic construct
  REGION 1..108: note = NK77.15_CD70_DB02_A09_VL
DIQMTQSPSSLSASVGDRVTITCQASQDISNYLNWYQQKPGKAPKLLIYDVSNLETGVPSRFSGSGSGTDFTLTISSLQPEDFATYYCQQANSFPLTFGGGTKVEIKR

SEQ ID NO: 978 - protein, 108 aa, synthetic construct
  REGION 1..108: note = NK77.16_CD70_DB02_A11_VL
DIQMTQSPSSLSASVGDRVTITCRASQTISNYLNWYQQKPGKAPKLLIYDASSLESGVPSRFSGSGSGTDFTLTISSLQPEDFATYYCQQAISFPLTFGGGTKVEIKR

SEQ ID NO: 979 - protein, 108 aa, synthetic construct
  REGION 1..108: note = NK77.17_CD70_DB02_B06_VL
DIQMTQSPSSLSASVGDRVTITCRASQSISSYLNWYQQKPGKAPKLLIYDASNLATGVPSRFSGSGSGTDFTLTISSLQPEDFATYYCQQSDSSPLTFGQGTKVEIKR

SEQ ID NO: 980 - protein, 108 aa, synthetic construct
  REGION 1..108: note = NK77.18_CD70_DB02_B09_VL
DIQMTQSPSSLSASVGDRVTITCQASQDISNYLNWYQQKPGKAPKLLIYGATTLQSGVPSRFSGSGSGTDFTLTISSLQPEDFATYYCQQADSFPYTFGQGTKLEIKR

SEQ ID NO: 981 - protein, 108 aa, synthetic construct
  REGION 1..108: note = NK77.19_CD70_DB02_C03_VL
DIQMTQSPSSLSASVGDRVTITCRASQTIDIYLNWYQQKPGKAPKLLIYDASNLETGVPSRFSGSGSGTDFTLTISSLQPEDFATYYCQQADSFPLTFGGGTKVEIKR

SEQ ID NO: 982 - protein, 108 aa, synthetic construct
  REGION 1..108: note = NK77.20_CD70_DB02_C04_VL
DIQMTQSPSSLSASVGDRVTITCRASQGISNNLNWYQQKPGKAPKLLIYAASSLHSGVPSRFSGSGSGTDFTLTISSLQPEDFATYYCQQADAFPLTFGGGTKVEIKR

SEQ ID NO: 983 - protein, 108 aa, synthetic construct
  REGION 1..108: note = NK77.22_CD70_DB02_C07_VL
DIQMTQSPSSLSASVGDRVTITCRASQSIGTWLAWYQQKPGKAPKLLIYAASSLQSGVPSRFSGSGSGTDFTLTISSLQPEDFATYYCQQSYTTPITFGQGTKVEIKR

SEQ ID NO: 984 - protein, 108 aa, synthetic construct
  REGION 1..108: note = NK77.24_CD70_DB02_D02_VL
EIVMTQSPATLSVSPGERATLSCRASQSVSSYLAWYQQKPGQAPRLLIYGASTRATGIPARFSGSGSGTEFTLTISSLQSEDFAVYYCQQYDSYPPTFGGGTKVEIKR

SEQ ID NO: 985 - protein, 108 aa, synthetic construct
  REGION 1..108: note = NK77.25_CD70_DB02_D04_VL
DIQMTQSPSSLSASVGDRVTITCQASQDISNYLNWYQQKPGKAPKLLIYAASTLESGVPSRFSGSGSGTDFTLTISSLQPEDFATYYCLQDYDYPLTFGQGTKLEIKR

SEQ ID NO: 986 - protein, 108 aa, synthetic construct
  REGION 1..108: note = NK77.26_CD70_DB02_D10_VL
DIQMTQSPSSLSASVGDRVTITCRASQTIYKWLAWYQQKPGKAPKLLIYDASSLESGVPSRFSGSGSGTDFTLTISSLQPEDFATYYCQQANSFPFTFGPGTKVDIKR

SEQ ID NO: 987 - protein, 108 aa, synthetic construct
  REGION 1..108: note = NK77.27_CD70_DB02_D11_VL
DIQMTQSPSSLSASVGDRVTITCQASQDISNYLNWYQQKPGKAPKLLIYDASNLETGVPSRFSGSGSGTDFTLTISSLQPEDFATYYCQQAHSFPPTFGQGTKVEIKR

SEQ ID NO: 988 - protein, 108 aa, synthetic construct
  REGION 1..108: note = NK77.28_CD70_DB02_E04_VL
DIQMTQSPSSLSASVGDRVTITCRASTSISDYVHWYQQKPGKAPKLLIYDASSLQSGVPSRFSGSGSGTDFTLTISSLQPEDFATYYCQQSDSTPPTFGGGTKVEIKR

SEQ ID NO: 989 - protein, 108 aa, synthetic construct
  REGION 1..108: note = NK77.29_CD70_DB02_F06_VL
DIQMTQSPSSLSASVGDRVTITCRASQGISNNLNWYQQKPGKAPKLLIYYASTLQSGVPSRFSGSGSGTDFTLTISSLQPEDFATYYCQQSYSTPITFGQGTRLEIKR

SEQ ID NO: 990 - protein, 108 aa, synthetic construct
  REGION 1..108: note = NK77.31_CD70_DB02_F08_VL
DIQMTQSPSSLSASVGDRVTITCRASQTISNYLNWYQQKPGKAPKLLIYDASTLEAGVPSRFSGSGSGTDFTLTISSLQPEDFATYYCQQSYNPPYTFGQGTKLEIKR

SEQ ID NO: 991 - protein, 108 aa, synthetic construct
  REGION 1..108: note = NK77.32_CD70_DB02_G07_VL
DIQMTQSPSSLSASVGDRVTITCRASQSISTYLNWYQQKPGKAPKLLIYDASNLEIGVPSRFSGSGSGTDFTLTISSLQPEDFATYYCQQSDSSPLTFGQGTKVEIKR

SEQ ID NO: 992 - protein, 108 aa, synthetic construct
  REGION 1..108: note = NK77.33_CD70_DB02_H04_VL
DIQMTQSPSSLSASVGDRVTITCQASQDISNYLNWYQQKPGKAPKLLIYAASSLQSGVPSRFSGSGSGTDFTLTISSLQPEDFATYYCQQSYRTPLTFGGGTKVEIKR

SEQ ID NO: 993 - protein, 108 aa, synthetic construct
  REGION 1..108: note = NK77.34_CD70_DB02_H05_VL
DIQMTQSPSSLSASVGDRVTITCRASQDIRNDLGWYQQKPGKAPKLLIYAASNLETGVPSRFSGSGSGTDFTLTISSLQPEDFATYYCQQSYSAPFTFGPGTKVDIKR

SEQ ID NO: 994 - protein, 108 aa, synthetic construct
  REGION 1..108: note = NK77.35_CD70_DB02_H08_VL
DIQMTQSPSSLSASVGDRVTITCRASQEISNYLAWYQQKPGKAPKLLIYDASNLQTGVPSRFSGSGSGTDFTLTISSLQPEDFATYYCQQSYSTPFTFGPGTKVDIKR

SEQ ID NO: 995 - protein, 108 aa, synthetic construct
  REGION 1..108: note = NK77.36_CD70_DB03_A06_VL
DIQMTQSPSSLSASVGDRVTITCQASQDISDSLNWYQQKPGKAPKLLIYSASSLQSGVPSRFSGSGSGTDFTLTISSLQPEDFATYYCQQSFTTPYTFGQGTKVEIKR

SEQ ID NO: 996 - protein, 108 aa, synthetic construct
  REGION 1..108: note = NK77.37_CD70_DB03_A07_VL
DIQMTQSPSSLSASVGDRVTITCRASQSISSWLAWYQQKPGKAPKLLIYDASNLETGVPSRFSGSGSGTDFTLTISSLQPEDFATYYCQQNFSPPLTFGQGTRLEIKR

SEQ ID NO: 997 - protein, 108 aa, synthetic construct
  REGION 1..108: note = NK77.38_CD70_DB03_A08_VL
DIQMTQSPSSLSASVGDRVTITCRASQDIRHYLAWYQQKPGKAPKLLIYDASSLQSGVPSRFSGSGSGTDFTLTISSLQPEDFATYYCQQTYDAPITFGQGTRLEIKR

SEQ ID NO: 998 - protein, 107 aa, synthetic construct
  REGION 1..107: note = NK77.39_CD70_DB03_A09_VL
DIVMTQSPDSLAVSLGERATINCRASSSISNYLAWYQQKPGQPPKLLIYGASTRASGVPDRFSGSGSGTDFTLTISSLQAEDVAVYYCQQSYSTPLTFGQGTKVEIK

SEQ ID NO: 999 - protein, 108 aa, synthetic construct
  REGION 1..108: note = NK77.40_CD70_DB03_A11_VL
DIQMTQSPSSLSASVGDRVTITCRASQGITNFLAWYQQKPGKAPKLLIYDASNLETGVPSRFSGSGSGTDFTLTISSLQPEDFATYYCQQSYGAPLTFGQGTRLEIKR

SEQ ID NO: 1000 - protein, 108 aa, synthetic construct
  REGION 1..108: note = NK77.41_CD70_DB03_A12_VL
DIQMTQSPSSLSASVGDRVTITCQASQDISNYLNWYQQKPGKAPKLLIYSASTLQSGVPSRFSGSGSGTDFTLTISSLQPEDFATYYCQQSYSSPYRFGQGTKVEIKR

SEQ ID NO: 1001 - protein, 113 aa, synthetic construct
  REGION 1..113: note = NK77.42_CD70_DB03_B01_VL
DIVMTQSPLSLPVTPGEPASISCRSSQSLLHSNGYNYLDWYLQKPGQSPQLLIYAASSLQSGVPDRFSGSGSGTDFTLKISRVEAEDVGVYYCMQGAHWPPTFGQGTKLEIKR

SEQ ID NO: 1002 - protein, 108 aa, synthetic construct
  REGION 1..108: note = NK77.43_CD70_DB03_B04_VL
DIQMTQSPSSLSASVGDRVTITCRASQDIRDGLGWYQQKPGKAPKLLIYAASTLQSGVPSRFSGSGSGTDFTLTISSLQPEDFATYYCQQSYGTPPTFGQGTKVEIKR

SEQ ID NO: 1003 - protein, 107 aa, synthetic construct
  REGION 1..107: note = NK77.44_CD70_DB03_B06_VL
EIVMTQSPATLSVSPGERATLSCRASQSVSSYLAWYQQKPGQAPRLLIYGASTRATGIPARFSGSGSGTEFTLTISSLQSEDFAVYYCQQYDSSPTFGQGTKVEIKR

SEQ ID NO: 1004 - protein, 108 aa, synthetic construct
  REGION 1..108: note = NK77.45_CD70_DB03_B09_VL
DIQMTQSPSSLSASVGDRVTITCRASQSISSYLNWYQQKPGKAPKLLIYDASNLETGVPSRFSGSGSGTDFTLTISSLQPEDFATYYCQQSHSAPITFGQGTRLEIKR

SEQ ID NO: 1005 - protein, 108 aa, synthetic construct
  REGION 1..108: note = NK77.46_CD70_DB03_C05_VL
DIQMTQSPSSLSASVGDRVTITCRASQSISTNLAWYQQKPGKAPKLLIYDASYLEAGVPSRFSGSGSGTDFTLTISSLQPEDFATYYCQQSYSTPPTFGQGTKLEIKR

SEQ ID NO: 1006 - protein, 114 aa, synthetic construct
  REGION 1..114: note = NK77.47_CD70_DB03_D11_VL
DIVMTQSPDSLAVSLGERATINCKSSQSVLYSSNNKNYLAWYQQKPGQPPKLLIYWASTRDSGVPDRFSGSGSGTDFTLTISSLQAEDVAVYYCQQYYGFPPTFGQGTRLEIKR

SEQ ID NO: 1007 - protein, 108 aa, synthetic construct
  REGION 1..108: note = NK77.48_CD70_DB03_E01_VL
DIQMTQSPSSLSASVGDRVTITCQASHDISKFLNWYQQKPGKAPKLLIYDASNLQRGVPSRFSGSGSGTDFTLTISSLQPEDFATYYCQQTYSFPFTFGQGTKLEIKR

SEQ ID NO: 1008 - protein, 113 aa, synthetic construct
  REGION 1..113: note = NK77.49_CD70_DB03_E03_VL
DIVMTQSPLSLPVTPGEPASISCRSSQSLLHSNGYNYLDWYLQKPGQSPQLLIYDASSLQSGVPDRFSGSGSGTDFTLKISRVEAEDVGVYYCMQARQTPLTFGQGTRLEIKR

SEQ ID NO: 1009 - protein, 113 aa, synthetic construct
  REGION 1..113: note = NK77.50_CD70_DB03_E09_VL
DIVMTQSPLSLPVTPGEPASISCRSSQSLLHSNGYNYLDWYLQKPGQSPQLLIYAASNLQGGVPDRFSGSGSGTDFTLKISRVEAEDVGVYYCMQTLESPVTFGGGTKVEIKR

SEQ ID NO: 1010 - protein, 108 aa, synthetic construct
  REGION 1..108: note = NK77.51_CD70_DB03_F02_VL
DIQMTQSPSSLSASVGDRVTITCRASQGISNNLNWYQQKPGKAPKLLIYDASNLERGVPSRFSGSGSGTDFTLTISSLQPEDFATYYCQQSYDGPITFGQGTRLEIKR

SEQ ID NO: 1011 - protein, 108 aa, synthetic construct
  REGION 1..108: note = NK77.52_CD70_DB03_F05_VL
DIQMTQSPSSLSASVGDRVTITCRASQSISSWLAWYQQKPGKAPKLLIYAASSLQSGVPSRFSGSGSGTDFTLTISSLQPEDFATYYCLQDYSYPLTFGGGTKVEIKR

SEQ ID NO: 1012 - protein, 108 aa, synthetic construct
  REGION 1..108: note = NK77.53_CD70_DB03_F06_VL
DIQMTQSPSSLSASVGDRVTITCRASQSINRWLAWYQQKPGKAPKLLIYDASNLETGVPSRFSGSGSGTDFTLTISSLQPEDFATYYCQQSYITPLTFGGGTKVEIKR

SEQ ID NO: 1013 - protein, 108 aa, synthetic construct
  REGION 1..108: note = NK77.54_CD70_DB03_F09_VL
DIQMTQSPSSLSASVGDRVTITCQASQDISNYLNWYQQKPGKAPKLLIYDASSLESGVPSRFSGSGSGTDFTLTISSLQPEDFATYYCQQTNSFPITFGQGTRLEIKR

SEQ ID NO: 1014 - protein, 108 aa, synthetic construct
  REGION 1..108: note = NK77.55_CD70_DB03_F12_VL
DIQMTQSPSSLSASVGDRVTITCQASQDIRNFLNWYQQKPGKAPKLLIYAASTLQSGVPSRFSGSGSGTDFTLTISSLQPEDFATYYCQQSYSAPSTFGQGTKLEIKR

SEQ ID NO: 1015 - protein, 108 aa, synthetic construct
  REGION 1..108: note = NK77.56_CD70_DB03_G06_VL
DIQMTQSPSSLSASVGDRVTITCRASQSISNYLNWYQQKPGKAPKLLIYDASNLETGVPSRFSGSGSGTDFTLTISSLQPEDFATYYCQQSYSTPITFGQGTRLEIKR

SEQ ID NO: 1016 - protein, 108 aa, synthetic construct
  REGION 1..108: note = NK77.57_CD70_DB03_G11_VL
DIQMTQSPSSLSASVGDRVTITCRASETISGWLAWYQQKPGKAPKLLIYDASNLETGVPSRFSGSGSGTDFTLTISSLQPEDFATYYCQQSYSTPWTFGQGTKLEIKR

SEQ ID NO: 1017 - protein, 108 aa, synthetic construct
  REGION 1..108: note = NK77.58_CD70_DB03_H08_VL
DIQMTQSPSSLSASVGDRVTITCRASQGIGSWLAWYQQKPGKAPKLLIYAASTLQSGVPSRFSGSGSGTDFTLTISSLQPEDFATYYCQQSYSTPWTFGPGTKVDIKR

SEQ ID NO: 1018 - protein, 108 aa, synthetic construct
  REGION 1..108: note = NK77.59_CD70_DB03_H10_VL
DIQMTQSPSSLSASVGDRVTITCRASQSISSSLAWYQQKPGKAPKLLIYDASSLQSGVPSRFSGSGSGTDFTLTISSLQPEDFATYYCQQSYNTPPTFGGGTKLEIKR

SEQ ID NO: 1019 - protein, 108 aa, synthetic construct
  REGION 1..108: note = NK77.60_CD70_DB04_A05_VL
DIQMTQSPSSLSASVGDRVTITCRASQGIGGYLAWYQQKPGKAPKLLIYDASNLETGVPSRFSGSGSGTDFTLTISSLQPEDFATYYCQQSYDSPPTFGQGTRLEIKR

SEQ ID NO: 1020 - protein, 108 aa, synthetic construct
  REGION 1..108: note = NK77.61_CD70_DB04_A07_VL
DIQMTQSPSSLSASVGDRVTITCRASQSVSSYLNWYQQKPGKAPKLLIYDTSNLETGVPSRFSGSGSGTDFTLTISSLQPEDFATYYCQQAHSFPLTFGGGTKVEIKR

SEQ ID NO: 1021 - protein, 113 aa, synthetic construct
  REGION 1..113: note = NK77.62_CD70_DB04_A10_VL
DIVMTQSPLSLPVTPGEPASISCRSSQSLLHSNGYNYLDWYLQKPGQSPQLLIYLGSTRASGVPDRFSGSGSGTDFTLKISRVEAEDVGVYYCMQALDTPLTFGGGTKLEIKR

SEQ ID NO: 1022 - protein, 108 aa, synthetic construct
  REGION 1..108: note = NK77.63_CD70_DB04_A11_VL
DIQMTQSPSSLSASVGDRVTITCQASQDISNYLNWYQQKPGKAPKLLIYDTSNLQTGVPSRFSGSGSGTDFTLTISSLQPEDFATYYLSTDLQTTAHFGQGTKVEIKR

SEQ ID NO: 1023 - protein, 113 aa, synthetic construct
  REGION 1..113: note = NK77.64_CD70_DB04_B03_VL
DIVMTQSPLSLPVTPGEPASISCRSSQSLLHSNGYNYLDWYLQKPGQSPQLLIYDASSLQSGVPDRFSGSGSGTDFTLKISRVEAEDVGVYYCMQGTHWPPTFGQGTKVEIKR

SEQ ID NO: 1024 - protein, 108 aa, synthetic construct
  REGION 1..108: note = NK77.65_CD70_DB04_B05_VL
DIQMTQSPSSLSASVGDRVTITCRASQSVSRYLNWYQQKPGKAPKLLIYDASNLETGVPSRFSGSGSGTDFTLTISSLQPEDFATYYCQQADSFPVTFGQGTKLEIKR

SEQ ID NO: 1025 - protein, 108 aa, synthetic construct
  REGION 1..108: note = NK77.66_CD70_DB04_B07_VL
DIQMTQSPSSLSASVGDRVTITCRASQGISNNLNWYQQKPGKAPKLLIYHASNLETGVPSRFSGSGSGTDFTLTISSLQPEDFATYYCQQSYDGPMTFGQGTKLEIKR

SEQ ID NO: 1026 - protein, 113 aa, synthetic construct
  REGION 1..113: note = NK77.67_CD70_DB04_C01_VL
DIVMTQSPLSLPVTPGEPASISCRSSQSLLHSNGYNYLDWYLQKPGQSPQLLIYDASNLETGVPDRFSGSGSGTDFTLKISRVEAEDVGVYYCMQGTHWPPTFGQGTKVEIKR

SEQ ID NO: 1027 - protein, 108 aa, synthetic construct
  REGION 1..108: note = NK77.68_CD70_DB04_C04_VL
DIQMTQSPSSLSASVGDRVTITCQASQDISNYLNWYQQKPGKAPKLLIYDASNLETGVPSRFSGSGSGTDFTLTISSLQPEDFATYYCQQSYDGPITFGQGTRLEIKR

SEQ ID NO: 1028 - protein, 108 aa, synthetic construct
  REGION 1..108: note = NK77.69_CD70_DB04_C06_VL
DIQMTQSPSSLSASVGDRVTITCRASQSISSYLNWYQQKPGKAPKLLIYDASNLETGVPSRFSGSGSGTDFTLTISSLQPEDFATYYCQQSYNTPPTFGGGTKVEIKR

SEQ ID NO: 1029 - protein, 108 aa, synthetic construct
  REGION 1..108: note = NK77.70_CD70_DB04_C07_VL
DIQMTQSPSSLSASVGDRVTITCQASQDISNYLNWYQQKPGKAPKLLIYGASSLQSGVPSRFSGSGSGTDFTLTISSLQPEDFATYYCLQDAATPITFGQGTRLEIKR

SEQ ID NO: 1030 - protein, 108 aa, synthetic construct
  REGION 1..108: note = NK77.71_CD70_DB04_D02_VL
DIQMTQSPSSLSASVGDRVTITCRASQSIGNWLAWYQQKPGKAPKLLIYDASDLETGVPSRFSGSGSGTDFTLTISSLQPEDFATYYCQQSYTTPWTFGQGTKVEIKR

SEQ ID NO: 1031 - protein, 113 aa, synthetic construct
  REGION 1..113: note = NK77.72_CD70_DB04_D05_VL
DIVMTQSPLSLPVTPGEPASISCRSSQSLLHSNGYNYLDWYLQKPGQSPQLLIYEVSNRASGVPDRFSGSGSGTDFTLKISRVEAEDVGVYYCMKGLQTPLTFGPGTKVDIKR

SEQ ID NO: 1032 - protein, 108 aa, synthetic construct
  REGION 1..108: note = NK77.73_CD70_DB04_D07_VL
DIQMTQSPSSLSASVGDRVTITCRASQGISNYLAWYQQKPGKAPKLLIYAASSLQSGVPSRFSGSGSGTDFTLTISSLQPEDFATYYCQQSHSTPLTFGQGTKVEIKR

SEQ ID NO: 1033 - protein, 108 aa, synthetic construct
  REGION 1..108: note = NK77.74_CD70_DB04_D08_VL
DIQMTQSPSSLSASVGDRVTITCRASQGISNNLNWYQQKPGKAPKLLIYDASNLETGVPSRFSGSGSGTDFTLTISSLQPEDFATYYCQQSYSTPYTFGQGTKVEIKR

SEQ ID NO: 1034 - protein, 108 aa, synthetic construct
  REGION 1..108: note = NK77.75_CD70_DB04_D10_VL
DIQMTQSPSSLSASVGDRVTITCRASQDIGNDLGWYQQKPGKAPKLLIYAASSLQSGVPSRFSGSGSGTDFTLTISSLQPEDFATYYCLQDYDYPLTFGQGTKVEIKR

SEQ ID NO: 1035 - protein, 107 aa, synthetic construct
  REGION 1..107: note = NK77.85_CD70_DB03_B02_VL
DIQMTQSPSSLSASVGDRVTITCRASQSISSYLNWYQQKPGKAPKLLIYDASNLETGVPSRFSGSGSGTDFTLTISSLQPEDFATYYCQQSYNTPYSFGQGTKVEIK

SEQ ID NO: 1036 - protein, 108 aa, synthetic construct
  REGION 1..108: note = NK77.86_CD70_DB04_A06_VL
DIQMTQSPSSLSASVGDRVTITCRTSQSISSYLNWYQQKPGKAPKLLIYDASNLETGVPSRFSGSGSGTDFTLTISSLQPEDFATYYCLQDYSYPLTFGQGTKVEIKR

SEQ ID NO: 1037 - protein, 108 aa, synthetic construct
  REGION 1..108: note = NK77.87_CD70_DB04_A09_VL
DIQMTQSPSSLSASVGDRVTITCQASQDISNYLNWYQQKPGKAPKLLIYDASSLQSGVPSRFSGSGSGTDFTLTISSLQPEDFATYYCQQSYSTPPAFGQGTKVEIKR

SEQ ID NO: 1038 - DNA, 354 bp, synthetic construct
  misc_feature 1..354: note = NK77.1_CD70_DB01_C03_VH_DNA
  source 1..354: mol_type = other DNA
caggtgcagctggtgcagtctggggctgaggtgaagaagcctggggcctcagtgaaggtctcctgcaaggcttctggatacaccttcaccggccattatttgcactgggtgcgacaggcccctggacaagggcttgagtggatgggatggatcaaccctaacagtggtggcacaaactatgcacagaagtttcagggcagggtcaccatgaccagggacacgtccactagcacagtgtacatggagctgagcagcctgagatctgaggacacggccgtgtattactgtgttagaggaagcggttggtatgacctggactactggggccaagggaccctggtcaccgtctcctca

SEQ ID NO: 1039 - DNA, 357 bp, synthetic construct
  misc_feature 1..357: note = NK77.2_CD70_DB01_D02_VH_DNA
  source 1..357: mol_type = other DNA
caggtgcagctggtgcagtctggggctgaggtgaagaagcctggggcctcagtgaaggtttcctgcaaggcatctggatacaccttcaccaactactatatgcactgggtgcgacaggcccctggacaagggcttgagtggatgggaataatcaaccctagtggtgggagcacaagctacgcacagaagttccagggcagagtcaccatgaccagggacacgtccacgagcacagtctacatggagctgagcagcctgagatctgaggacacggccgtgtattactgtgctagagaactaggagtcgccgggtacttcgatctctggggccgtggcaccctggtcactgtctcctca

SEQ ID NO: 1040 - DNA, 369 bp, synthetic construct
  misc_feature 1..369: note = NK77.3_CD70_DB01_E06_VH_DNA
  source 1..369: mol_type = other DNA
caggtgcagctggtgcagtctggggctgaggtgaagaagcctggggcctcagtgaaggtttcctgcaaggcatctggatacaccttcaccggttactatatccactgggtgcgacaggcccctggacaagggcttgagtggatgggaataatcaaccctagtggtggaagcacaagctacgcacagaagttccagggcagagtcaccatgaccagggacacgtccacgagcacagtctacatggagctgagcagcctgagatctgaggacacggccgtgtattactgtgctagagacctgtcagggatcgacggatatattggtttctttgactactggggccaagggaccctggtcaccgtctcctca

SEQ ID NO: 1041 - DNA, 357 bp, synthetic construct
  misc_feature 1..357: note = NK77.4_CD70_DB01_G04_VH_DNA
  source 1..357: mol_type = other DNA
caggtgcagctggtgcagtctggggctgaggtgaagaagcctggggcctcagtgaaggtttcctgcaaggcatctggaggaaccttcagaagccatgtcatatcctgggtgcgacaggcccctggacaagggcttgagtggatgggaataatcgatcctagtggtggcagcacaagctacgcacagaggttccagggcagagtcaccatgaccagggacacgtccacgagcacagtctacatggagctgagcagcctgagatctgaggacacggccgtgtattactgtgctaaagattacactgggctgcttggaatggatgtctggggccaagggacaaccgtcaccgtctcttca

SEQ ID NO: 1042 - DNA, 357 bp, synthetic construct
  misc_feature 1..357: note = NK77.5_CD70_DB01_G05_VH_DNA
  source 1..357: mol_type = other DNA
caggtgcagctggtgcagtctggggctgaggtgaagaagcctggggcctcagtgaaggtctcctgcaaggcttctggatacaccttcatcgactattatatccattgggtgcgacaggcccctggacaagggcttgagtggatgggatggatgaaccccaacagtggtaacacaggctatgcacagaagttccagggcagagtcaccatgaccagggacacctccacaagcacagtctacatggagctgagcagcctgagatctgaggacacggccgtgtattactgtgcgagaggcctttccggctacgacttggacgactactggggccaagggaccctggtcaccgtctcctca

SEQ ID NO: 1043 - DNA, 354 bp, synthetic construct
  misc_feature 1..354: note = NK77.6_CD70_DB01_G07_VH_DNA
  source 1..354: mol_type = other DNA
caggtgcagctggtgcagtctggggctgaggtgaagaagcctggggcctcagtgaaggtttcctgcaaggcatctggatacaccttcaccagctactatatgcactgggtgcgacaggcccctggacaagggcttgagtggatgggatggatcaacccgaacagtggtggcacaaaatacgcacataagttccagggcagagtcaccatgaccagggacacgtccacgagcacagtctacatggagctgagcagcctgagatctgaggacacggccgtgtattactgtgctagaggactgtcaggttacgattttgactactggggccaagggaccacagtcaccgtctcctca

SEQ ID NO: 1044 - DNA, 357 bp, synthetic construct
  misc_feature 1..357: note = NK77.7_CD70_DB01_G11_VH_DNA
  source 1..357: mol_type = other DNA
caggtgcagctggtgcagtctggggctgaggtgaagaagcctggggcctcagtgaaggtttcctgcaaggcatctggatacaccttcaccggctactatatgcactgggtgcgacaggcccctggacaagggcttgagtggatgggatggatgaaccctaatagtggtaacacaggctacgcacagaagttccagggcagagtcaccatgaccagggacacgtccacgagcacagtctacatggagctgagcagcctgagatctgaggacacggccgtgtattactgtgctagagggaccgacgtgtatggagactttgactactggggccaagggaccctggtcaccgtctcctca

SEQ ID NO: 1045 - DNA, 378 bp, synthetic construct
  misc_feature 1..378: note = NK77.9_CD70_DB02_A03_VH_DNA
  source 1..378: mol_type = other DNA
caggtgcagctggtgcagtctggggctgaggtgaagaagcctgggtcctcggtgaaggtctcctgcaaggcttctggatacaccttcacagagaacgaaatgcattgggtgcgacaggcccctggacaagggcttgagtggatgggaggcatcatccctatctttggtacagcaaactacgcacagaagttccagggcagagtcacgattaccgcggacgaatccacgagcacagcctacatggagctgagcagcctgagatctgaggacacggccgtgtattactgtgcgagagagggaggaaccgccatggccaccggttattactactatgggatggacgtgtggggccaagggaccaccgtcaccgtctcctca

SEQ ID NO: 1046 - DNA, 357 bp, synthetic construct
  misc_feature 1..357: note = NK77.10_CD70_DB02_A04_VH_DNA
  source 1..357: mol_type = other DNA
caggtgcagctggtgcagtctggggctgaggtgaagaagcctggggcctcagtgaaggtttcctgcaaggcatctggatacaccttcaccgagaatgaaatgcactgggtgcgacaggcccctggacaagggcttgagtggatgggatggatcaactctaatggtggctacacagggtacgcactgaagttccagggcagagtcaccatgaccagggacacgtccacgagcacagtctacatggagctgagcagcctgagatctgaggacacggccgtgtattactgtgctagagccagtaattacggaggacactttgactactggggccaagggaccctggtcaccgtctcctca

SEQ ID NO: 1047 - DNA, 360 bp, synthetic construct
  misc_feature 1..360: note = NK77.11_CD70_DB02_A05_VH_DNA
  source 1..360: mol_type = other DNA
caggtgcagctggtgcagtctggggctgaggtgaagaagcctggggcctcagtgaaggtttcctgcaaggcatctggatacaccttcaccagctactatatgcactgggtgcgacaggcccctggacaagggcttgagtggatgggaataatcaaccctagtggtggcagcacaatatacgcacagaagttccagggcagagtcaccatgaccagggacacgtccacgagcacagtctacatggagctgagcagcctgagatctgaggacacggccgtgtattactgtgctaaagacatgggagcgtgggcagctggttttgactactggggccaagggaccctggtcaccgtctcctca

SEQ ID NO: 1048 - DNA, 360 bp, synthetic construct
  misc_feature 1..360: note = NK77.12_CD70_DB02_A06_VH_DNA
  source 1..360: mol_type = other DNA
caggtgcagctggtgcagtctggggctgaggtgaagaagcctggggcctcagtgaaggtttcctgcaaggcatctggatacaccttcaccgggtactatatgcactgggtgcgacaggcccctggacaagggcttgagtggatgggatggatcaacccaaatagtggtgatacagggtacgcacagaagttccagggcagagtcaccatgaccagggacacgtccacgagcacagtctacatggagctgagcagcctgagatctgaggacacggccgtgtattactgtgctagatccgtcaacgactacggtgattacgacggttactggggccaagggaccctggtcaccgtctcctca

SEQ ID NO: 1049 - DNA, 360 bp, synthetic construct
  misc_feature 1..360: note = NK77.13_CD70_DB02_A07_VH_DNA
  source 1..360: mol_type = other DNA
caggtgcagctggtgcagtctggggctgaggtgaagaagcctggggcctcagtgaaggtttcctgcaaggcatctggatacaccttcaccggatactatatgcactgggtgcgacaggcccctggacaagggcttgagtggatgggaataatcaaccctagtggtgggagcacaagctacgcacagaagttccagggcagagtcaccatgaccagggacacgtccacgagcacagtctacatggagctgagcagcctgagatctgaggacacggccgtgtattactgtgctagagattacggtgattatgacgcctcgtttgactactggggccaagggaccctggtcaccgtctcctca

SEQ ID NO: 1050 - DNA, 351 bp, synthetic construct
  misc_feature 1..351: note = NK77.14_CD70_DB02_A08_VH_DNA
  source 1..351: mol_type = other DNA
caggtgcagctggtgcagtctggggctgaggtgaagaagcctggggcctcagtgaaggtttcctgcaaggcatctggatacaccttcaccagctacgatatcaattgggtgcgacaggcccctggacaagggcttgagtggatgggaataatcaacccctccgatggtagcacaatctacgcacagaacttccagggcagagtcaccatgaccagggacacgtccacgagcacagtctacatggagctgagcagcctgagatctgaggacacggccgtgtattactgtgtgaaggaagaggcctggtacttcgatctctggggccgtggcaccctggtcactgtctcctca

SEQ ID NO: 1051 - DNA, 351 bp, synthetic construct
  misc_feature 1..351: note = NK77.15_CD70_DB02_A09_VH_DNA
  source 1..351: mol_type = other DNA
caggtgcagctggtgcagtctggggctgaggtgaagaagcctggggcctcagtgaaggtttcctgcaaggcatctggatacaccttcaccagctactatatgcactgggtgcgacaggcccctggacaagggcttgagtggatgggatggatgaaccctgataacggtgatacagggtacgcacagatgttccagggcagagtcaccatgaccagggacacgtccacgagcacagtctacatggagctgagcagcctgagatctgaggacacggccgtgtattactgtgcttcaggggattactatgacatcttgtactggggccaagggaccctggtcaccgtctcctca

SEQ ID NO: 1052 - DNA, 354 bp, synthetic construct
  misc_feature 1..354: note = NK77.16_CD70_DB02_A11_VH_DNA
  source 1..354: mol_type = other DNA
caggtgcagctggtgcagtctggggctgaggtgaagaagcctggggcctcagtgaaggtttcctgcaaggcatctggatacaccttcaccagctactatatgcactgggtgcgacaggcccctggacaagggcttgagtggatgggatggatgaaccccaacagtggtgatacaggatacgcacagaagttccagggcagagtcaccatgaccagggacacgtccacgagcacagtctacatggagctgagcagcctgagatctgaggacacggccgtgtattactgtgctagagggcccagcgggtacgaatttgactactggggccaagggaccctggtcaccgtctcctca

SEQ ID NO: 1053 - DNA, 366 bp, synthetic construct
  misc_feature 1..366: note = NK77.17_CD70_DB02_B06_VH_DNA
  source 1..366: mol_type = other DNA
caggtgcagctggtgcagtctggggctgaggtgaagaagcctggggcctcagtgaaggtttcctgcaaggcatctggatacaccttcaccgattactatatgcactgggtgcgacaggcccctggacaagggcttgagtggatgggaataatcaaccctaatagtggtggaacaaattacgcacagaagttccagggcagagtcaccatgaccagggacacgtccacgagcacagtctacatggagctgagcagcctgagatctgaggacacggccgtgtattactgtgctagagattttagtgtgtatgctgctgcagatggcatggatgtctggggccaagggacattggtcaccgtctcttca

SEQ ID NO: 1054 - DNA, 363 bp, synthetic construct
  misc_feature 1..363: note = NK77.18_CD70_DB02_B09_VH_DNA
  source 1..363: mol_type = other DNA
caggtgcagctggtgcagtctggggctgaggtgaagaagcctggggcctcagtgaaggtttcctgcaaggcatctggatacaccttcaccgggtactatatgcactgggtgcgacaggcccctggacaagggcttgagtggatgggaataatcaaccctggggatggcggtacaatctacgcacagaatttccagggcagagtcaccatgaccagggacacgtccacgagcacagtctacatggagctgagcagcctgagatctgaggacacggccgtgtattactgtgctagaggattcggcgagtcagcccccgatgcttttgatatctggggccaagggacaatggtcaccgtctcttca

SEQ ID NO: 1055 - DNA, 354 bp, synthetic construct
  misc_feature 1..354: note = NK77.19_CD70_DB02_C03_VH_DNA
  source 1..354: mol_type = other DNA
caggtgcagctggtgcagtctggggctgaggtgaagaagcctggggcctcagtgaaggtttcctgcaaggcatctggatacaccttcaccggttactatatgcactgggtgcgacaggcccctggacaagggcttgagtggatgggaataatcaaccctagtggtgggagcacaagctacgcacagaagttccagggcagagtcaccatgaccagggacacgtccacgagcacagtctacatggagctgagcagcctgagatctgaggacacggccgtgtattactgtgctgccgggacagagatctactacatggacgtctggggcaaagggaccacggtcaccgtctcctca

SEQ ID NO: 1056 - DNA, 381 bp, synthetic construct
  misc_feature 1..381: note = NK77.20_CD70_DB02_C04_VH_DNA
  source 1..381: mol_type = other DNA
caagtgcagttagttcagtcaggcgccgaagttaaaaaacccggagcgagcgtaaaagtgtcttgtaaagccagtggcggcacatttagctcttatgcgatatcatgggttcgccaagcaccaggccagggcctggaatggatggggatgataaatccaagtgatggcgccactacttacgcacagaagttccagggcagagtcaccatgaccagggacacgtccacgagcacagtctacatggagctgagcagcctgagatctgaggacacggccgtgtattactgtgctagagagagggagctactacatttcgccacaaattattactactatggtatggacgtgtggggccaagggaccaccgtcaccgtctcctca

SEQ ID NO: 1057 - DNA, 369 bp, synthetic construct
  misc_feature 1..369: note = NK77.22_CD70_DB02_C07_VH_DNA
  source 1..369: mol_type = other DNA
caggtgcagctggtgcagtctggggctgaggtgaagaagcctggggcctcagtgaaggtttcctgcaaggcatctggatacaccttcacccggaactatatgcactgggtgcgacaggcccctggacaagggcttgagtggatgggatggatctctcctgacaatggtgttacaaattacgcacagaatttccagggcagagtcaccatgaccagggacacgtccacgagcacagtctacatggagctgagcagcctgagatctgaggacacggccgtgtattactgtgctaagacacaaggctcatccagctggtatcagtggtacttcgatctctggggccgtggcaccctggtcactgtctcctca

SEQ ID NO: 1058 - DNA, 357 bp, synthetic construct
  misc_feature 1..357: note = NK77.24_CD70_DB02_D02_VH_DNA
  source 1..357: mol_type = other DNA
caggtgcagctggtgcagtctggggctgaggtgaagaagcctggggcctcagtgaaggtttcctgcaaggcatctggatacaccttcaccagctactatatgcactgggtgcgacaggcccctggacaagggcttgagtggatgggaataatcgatccagggagtggtgacacaagctacgcacagaagttccagggcagagtcaccatgaccagggacacgtccacgagcacagtctacatggagctgagcagcctgagatctgaggacacggccgtgtattactgtgctagagggtccaactggtacgactactttgactactggggccaagggaccctggtcaccgtctcctca

SEQ ID NO: 1059 - DNA, 357 bp, synthetic construct
  misc_feature 1..357: note = NK77.25_CD70_DB02_D04_VH_DNA
  source 1..357: mol_type = other DNA
caggtgcagctggtgcagtctggggctgaggtgaagaagcctggggcctcagtgaaggtttcctgcaaggcatctggataccgcctgagcgaccattatatgcactgggtgcgacaggcccctggacaagggcttgagtggatgggaataatcaaccctagtggtgggagcacaacatacgcacagaacttccagggcagagtcaccatgaccagggacacgtccacgagcacagtctacatggagctgagcagcctgagatctgaggacacggccgtgtattactgtgcttccagttactatggtgactacgtcttggtgaattggggccaagggaccctggtcaccgtctcctca

SEQ ID NO: 1060 - DNA, 360 bp, synthetic construct
  misc_feature 1..360: note = NK77.26_CD70_DB02_D10_VH_DNA
  source 1..360: mol_type = other DNA
caggtgcagctggtgcagtctggggctgaggtgaagaagcctggggcctcagtgaaggtttcctgcaaggcatctggatacaccttcaccgattactatgtccactgggtgcgacaggcccctggacaagggcttgagtggatgggatggatcaacccgaatactggtgggacaagcttcgcacagaatttccagggcagagtcaccatgaccagggacacgtccacgagcacagtctacatggagctgagcagcctgagatctgaggacacggccgtgtattactgtgctagagatctgggtcaatggttgggagagattgactactggggccaagggaccctggtcaccgtctcctca

SEQ ID NO: 1061 - DNA, 372 bp, synthetic construct
  misc_feature 1..372: note = NK77.27_CD70_DB02_D11_VH_DNA
  source 1..372: mol_type = other DNA
caggtgcagctggtgcagtctggggctgaggtgaagaagcctggggcctcagtgaaggtttcctgcaaggcatctggatacaccttcaccgactacaccgattactttgtgcactgggtgcgacaggcccctggacaagggcttgagtggatgggaatattcaaccctagtgatggtagcacaagctacgcacaggaattccagggcagagtcaccatgaccagggacacgtccacgagcacagtctacatggagctgagcagcctgagatctgaggacacggccgtgtattactgtgctagaggaccttacagtagtagctggtattactttgactactggggccaagggaccctggtcaccgtctcctca

SEQ ID NO: 1062 - DNA, 360 bp, synthetic construct
  misc_feature 1..360: note = NK77.28_CD70_DB02_E04_VH_DNA
  source 1..360: mol_type = other DNA
caggtgcagctggtgcagtctggggctgaggtgaagaagcctggggcctcagtgaaggtttcctgcaaggcatctggatacatcttcaccgattactatatgcactgggtgcgacaggcccctggacaagggcttgagtggatgggaataatcaaccctagtggtggagatacactttacgcacagaagttccagggcagagtcaccatgaccagggacacgtccacgagcacagtctacatggagctgagcagcctgagatctgaggacacggccgtgtattactgtgctagagaaggcgtaggagctatgggcgtgtttgactactggggccaagggaccctggtcaccgtctcctca

SEQ ID NO: 1063 - DNA, 366 bp, synthetic construct
  misc_feature 1..366: note = NK77.29_CD70_DB02_F06_VH_DNA
  source 1..366: mol_type = other DNA
caggtgcagctggtgcagtctggggctgaggtgaagaagcctggggcctcagtgaaggtttcctgcaaggcatctggatacaccttcaccgatcactatatccactgggtgcgacaggcccctggacaagggcttgagtggatgggatggatcagtgcgtacaatggtaaaacaaattacgcacagaagttccagggcagagtcaccatgaccagggacacgtccacgagcacagtctacatggagctgagcagcctgagatctgaggacacggccgtgtattactgtgctagagacacaatctactatgacttttggagtgggtacgactactggggccaagggaccctggtcaccgtctcctca

SEQ ID NO: 1064 - DNA, 366 bp, synthetic construct
  misc_feature 1..366: note = NK77.31_CD70_DB02_F08_VH_DNA
  source 1..366: mol_type = other DNA
caggtgcagctggtgcagtctggggctgaggtgaagaagcctggggcctcagtgaaggtttcctgcaaggcatctggatacaccttcaccagctactatatgcactgggtgcgacaggcccctggacaagggcttgagtggatgggaataatcaaccctagtggtggcgcgacaatctacgcacagaagttccagggcagagtcaccatgaccagggacacgtccacgagcacagtctacatggagctgagcagcctgagatctgaggacacggccgtgtattactgtgctagatctcgcggtgactactatggaagcggggattttgactactggggccaagggaccctggtcaccgtctcctca

SEQ ID NO: 1065 - DNA, 354 bp, synthetic construct
  misc_feature 1..354: note = NK77.32_CD70_DB02_G07_VH_DNA
  source 1..354: mol_type = other DNA
caggtgcagctggtgcagtctggggctgaggtgaagaagcctggggcctcagtgaaggtttcctgcaaggcatctggatacaccttcaccgattactatatgcactgggtgcgacaggcccctggacaagggcttgagtggatgggaataatcaaccctagtggtggaagcacaagctacgcacagaagttccagggcagagtcaccatgaccagggacacgtccacgagcacagtctacatggagctgagcagcctgagatctgaggacacggccgtgtattactgtgctagaggatattttgatcacgcattcgatatctggggccaagggacaatggtcaccgtctcttca

SEQ ID NO: 1066 - DNA, 372 bp, synthetic construct
  misc_feature 1..372: note = NK77.33_CD70_DB02_H04_VH_DNA
  source 1..372: mol_type = other DNA
caggtgcagctggtgcagtctggggctgaggtgaagaagcctggggcctcagtgaaggtttcctgcaaggcatctggatacaccttcaccggttactatatgcactgggtgcgacaggcccctggacaagggcttgagtggatgggaataatcaaccctagtggtggggatacaatatacgcacagaagttccagggcagagtcaccatgaccagggacacgtccacgagcacagtctacatggagctgagcagcctgagatctgaggacacggccgtgtattactgtgctagaggtgactcgtcttcatggtacgactattactactacatggacgtctggggcaaagggaccacggtcaccgtctcctca

SEQ ID NO: 1067 - DNA, 357 bp, synthetic construct
  misc_feature 1..357: note = NK77.34_CD70_DB02_H05_VH_DNA
  source 1..357: mol_type = other DNA
caggtgcagctggtgcagtctggggctgaggtgaagaagcctggggcctcagtgaaggtttcctgcaaggcatctggatacaccttcaccgactactttacccactgggtgcgacaggcccctggacaagggcttgagtggatgggatggatcaacacatatgacggtaatacaaattacgcacagaagttccagggcagagtcaccatgaccagggacacgtccacgagcacagtctacatggagctgagcagcctgagatctgaggacacggccgtgtattactgtgctagagaaatggagtggctcggccaggtggactactggggccaagggaccctggtcaccgtctcctca

SEQ ID NO: 1068 - DNA, 357 bp, synthetic construct
  misc_feature 1..357: note = NK77.35_CD70_DB02_H08_VH_DNA
  source 1..357: mol_type = other DNA
caggtgcagctggtgcagtctggggctgaggtgaagaagcctggggcctcagtgaaggtttcctgcaaggcatctggatacaccttcaccagctactatatacactgggtgcgacaggcccctggacaagggcttgagtggatgggacgaatcaaccctaatggtggagggacaaactacgcacagaagttccagggcagagtcaccatgaccagggacacgtccacgagcacagtctacatggagctgagcagcctgagatctgaggacacggccgtgtattactgtgctagaggccacagagggggtggcgggattgactactggggccaagggaccctggtcaccgtctcctca

SEQ ID NO: 1069 - DNA, 357 bp, synthetic construct
  misc_feature 1..357: note = NK77.36_CD70_DB03_A06_VH_DNA
  source 1..357: mol_type = other DNA
caggtgcagctggtgcagtctggggctgaggtgaagaagcctggggcctcagtgaaggtttcctgcaaggcatctggaggtaccttcagtagctacgcaatttcatgggtgcgacaggcccctggacaagggcttgagtggatgggatggatctctcccaacagtggtgacacacactacgcacagaagttccagggcagagtcaccatgaccagggacacgtccacgagcacagtctacatggagctgagcagcctgagatctgaggacacggccgtgtattactgtgctagagactgggggtcaggctggtacgtggactactggggccaagggaccctggtcaccgtctcctca

SEQ ID NO: 1070 - DNA, 357 bp, synthetic construct
  misc_feature 1..357: note = NK77.37_CD70_DB03_A07_VH_DNA
  source 1..357: mol_type = other DNA
caggtgcagctggtgcagtctggggctgaggtgaagaagcctgggtcctcggtgaaggtctcctgcaaggcttctggaggcaccttcaatagctatggaatcagctgggtgcgacaggcccctggacaagggcttgagtggatgggaggtatcatccctatctttggtacagcaaactacgcacagaagttccagggcagagtcacgattaccgcggacgaatccacgagcacagcctacatggagctgagcagcctgagatctgaggacacggccgtgtattactgtgcgagagatacctacggggatgacgcttttgatatctggggccaagggacaatggtcaccgtctcttca

SEQ ID NO: 1071 - DNA, 372 bp, synthetic construct
  misc_feature 1..372: note = NK77.38_CD70_DB03_A08_VH_DNA
  source 1..372: mol_type = other DNA
caggtgcagctggtgcagtctggggctgaggtgaagaagcctggggcctcagtgaaggtttcctgcaaggcatctggatacagtttcaccagctactatatgcactgggtgcgacaggcccctggacaagggcttgagtggatgggaataatcaaccctagtggtgggactacaagctacgcacagaagttccagggcagagtcaccatgaccagggacacgtccacgagcacagtctacatggagctgagcagcctgagatctgaggacacggccgtgtattactgtgctagagacaattccccgtatagctcaagctggtgggactactttgactactggggccaagggaccctggtcaccgtctcctca

SEQ ID NO: 1072 - DNA, 366 bp, synthetic construct
  misc_feature 1..366: note = NK77.39_CD70_DB03_A09_VH_DNA
  source 1..366: mol_type = other DNA
caggtgcagctggtgcagtctggggctgaggtgaagaagcctggggcctcagtgaaggtttcctgcaaggcatctggatacaccttcaccgattactatattcactgggtgcgacaggcccctggacaagggcttgagtggatgggatggatcaccccgaacagtggttatacatattacgcacagaatttccagggcagagtcaccatgaccagggacacgtccacgagcacagtctacatggagctgagcagcctgagatctgaggacacggccgtgtattactgtgctagaaacacagactgttatggggacttcctggggctggatgtctggggccaagggacaacggtcaccgtctcttca

SEQ ID NO: 1073 - DNA, 366 bp, synthetic construct
  misc_feature 1..366: note = NK77.40_CD70_DB03_A11_VH_DNA
  source 1..366: mol_type = other DNA
caggtgcagctggtgcagtctggggctgaggtgaagaagcctggggcctcagtgaaggtttcctgcaaggcatctggatacaccttcaacggctaccttatgcactgggtgcgacaggcccctggacaagggcttgagtggatgggaatagttaacccttccgatggtagcacaggctacgcacagaagttccagggcagagtcaccatgaccagggacacgtccacgagcacagtctacatggagctgagcagcctgagatctgaggacacggccgtgtattactgtgcgaaggacacaggactccgctactttgactggctacttgactactggggccaagggaccctggtcaccgtctcctca

SEQ ID NO: 1074 - DNA, 354 bp, synthetic construct
  misc_feature 1..354: note = NK77.41_CD70_DB03_A12_VH_DNA
  source 1..354: mol_type = other DNA
caggtgcagctggtgcagtctggggctgaggtgaagaagcctggggcctcagtgaaggtttcctgcaaggcatctggatacaccttcaccagctactatatgcactgggtgcgacaggcccctggacaagggcttgagtggatgggaataatcgatcctagtggtggccgaacaatttacgcacagcgcttccagggcagagtcaccatgaccagggacacgtccacgagcacagtctacatggagctgagcagcctgagatctgaggacacggccgtgtattactgtgctagacacgaagcaggcggaatctttgactactggggccaagggaccctggtcaccgtctcctca

SEQ ID NO: 1075 - DNA, 363 bp, synthetic construct
  misc_feature 1..363: note = NK77.42_CD70_DB03_B01_VH_DNA
  source 1..363: mol_type = other DNA
caggtccagctggtgcagtctggggctgaggtgaagaagcctgggtcctcagtgaaggtctcctgcaaggcttctggatataccttcagcgactcctacatgcattgggtgcgacaggcccctggacaagggcttgagtgggtcggagggatcatccctatggcaggtatacccgcctacgcagaggaattccagggcagagtcacgattaccgcggacgagtccacgagcacagcctacatggagctgagcagcctgagatctgaggacacggccgtgtattactgtgcgagagccgacgattatgggggaaattggtacttcgatctctggggccgtggcaccctggtcactgtctcctca

SEQ ID NO: 1076 - DNA, 360 bp, synthetic construct
  misc_feature 1..360: note = NK77.43_CD70_DB03_B04_VH_DNA
  source 1..360: mol_type = other DNA
caggtgcagctggtgcagtctggggctgaggtgaagaagcctggggcctcagtgaaggtttcctgcaaggcatctggatacatcttcaccgactactatatgcactgggtgcgacaggcccctggacaagggcttgagtggatgggaataatcaaccctagtggtggcagcacaagctacgcacagaagttccagggcagagtcaccatgaccagggacacgtccacgagcacagtctacatggagctgagcagcctgagatctgaggacacggccgtgtattactgtgctagagactcaggatggtatgagtcctggttcgacccctggggccagggaaccctggtcaccgtctcctca

SEQ ID NO: 1077 - DNA, 366 bp, synthetic construct
  misc_feature 1..366: note = NK77.44_CD70_DB03_B06_VH_DNA
  source 1..366: mol_type = other DNA
caggtgcagctggtgcagtctggggctgaggtgaagaagcctggggcctcagtgaaggtttcctgcaaggcatctggatacaccttcaccgactactatcttcactgggtgcgacaggcccctggacaagggcttgagtggatgggatggatcagcgcctacaatggtaacacaaattacgcacagaagttccagggcagagtcaccatgaccagggacacgtccacgagcacagtctacatggagctgagcagcctgagatctgaggacacggccgtgtattactgtgctagagagattgtgggtgctacagaagattggtacttcgatctctggggccgtggcaccctggtcactgtctcctca

SEQ ID NO: 1078 - DNA, 357 bp, synthetic construct
  misc_feature 1..357: note = NK77.45_CD70_DB03_B09_VH_DNA
  source 1..357: mol_type = other DNA
caggtgcagctggtgcagtctggggctgaggtgaagaagcctggggcctcagtgaaggtttcctgcaaggcatctggatacaccttcaccgcctactatctgcactgggtgcgacaggcccctggacaagggcttgagtggatgggaatgatcaaccccaacaatggtggcacaatttacgcacagacattccagggcagagtcaccatgaccagggacacgtccacgagcacagtctacatggagctgagcagcctgagatctgaggacacggccgtgtattactgtgctagagacctgggcggctacgtcctgtttgactactggggccaagggaccctggtcaccgtctcctca

SEQ ID NO: 1079 - DNA, 357 bp, synthetic construct
  misc_feature 1..357: note = NK77.46_CD70_DB03_C05_VH_DNA
  source 1..357: mol_type = other DNA
caggtgcagctggtgcagtctggggctgaggtgaagaagcctggggcctcagtgaaggtttcctgcaaggcatctggatacaccttcaccgactactatattcactgggtgcgacaggcccctggacaagggcttgagtggatgggaatgatcaaccctagaggaggtagcacaacttacgcacagtcattccagggcagagtcaccatgaccagggacacgtccacgagcacagtctacatggagctgagcagcctgagatctgaggacacggccgtgtattactgtgctagagatttaggtgactatggggactacgactactggggccaagggaccctggtcaccgtctcctca

SEQ ID NO: 1080 - DNA, 372 bp, synthetic construct
  misc_feature 1..372: note = NK77.47_CD70_DB03_D11_VH_DNA
  source 1..372: mol_type = other DNA
gaggtgcagctgttggagtctgggggaggcttggtacagcctggggggtccctgagactctcctgtgcagcctctggattcacctttagcaattcagatatgaattgggtccgccaggctccagggaaggggctggagtgggtctcagctattagtggtggaggtgacacactctactacgcagactccgtgaagggccggttcaccatctccagagacaattccaagaacacgctgtatctgcaaatgaacagcctgagagccgaggacacggccgtatattactgtgcgatggccagcgctttggacagtagcggtgacaatgaggcttttgatatctggggccaagggacaacagtcaccgtctcttca

SEQ ID NO: 1081 - DNA, 366 bp, synthetic construct
  misc_feature 1..366: note = NK77.48_CD70_DB03_E01_VH_DNA
  source 1..366: mol_type = other DNA
caggtgcagctggtgcagtctggggctgaggtgaagaagcctggggcctcagtgaaggtttcctgcaaggcatctggatacaccttcaccagctactatatgcactgggtgcgacaggcccctggacaagggcttgagtggatgggatggatcaacccaaataacggtggtacaagctacgcacagaagttccagggcagagtcaccatgaccagggacacgtccacgagcacagtctacatggagctgagcagcctgagatctgaggacacggccgtgtattactgtgctagagtggaggacgatttctggagcggccctagctttgactactggggccaagggaccctggtcaccgtctcctca

SEQ ID NO: 1082 - DNA, 357 bp, synthetic construct
  misc_feature 1..357: note = NK77.49_CD70_DB03_E03_VH_DNA
  source 1..357: mol_type = other DNA
caggtgcagctggtgcagtctggggctgaggtgaagaagcctgggtcctcggtgaaggtctcctgcaaggcttctggaggcaccttcaccaattatgctttcagctgggtgcgacaggcccctggacaagggcttgagtggatgggaggtatcatccctatcagcggtgccgcaaactacgcacagaagttccagggcagagtcacgattaccgcggacgaatccacgagcacagcctacatggagctgagcagcctgagatctgaggacacggccgtgtattactgtgcgagagggtccggactggacgatgcttttgatatctggggccaagggacaatggtcaccgtctcttca

SEQ ID NO: 1083 - DNA, 387 bp, synthetic construct
  misc_feature 1..387: note = NK77.50_CD70_DB03_E09_VH_DNA
  source 1..387: mol_type = other DNA
caggtgcagctggtgcagtctggggctgaggtgaagaagcctggggcctcagtgaaggtttcctgcaaggcatctggatacaccttcaccgcgtactatatgcactgggtgcgacaggcccctggacaagggcttgagtggatgggatggatgaaccccaatagtggtaacacaggatacgcacagaagttccagggcagagtcaccatgaccagggacacgtccacgagcacagtctacatggagctgagcagcctgagatctgaggacacggccgtgtattactgtgctagagagggcagaatcgattacggggactacgacgactactactattactacggtatggacgtgtggggccaagggaccactgtcaccgtctcctca

SEQ ID NO: 1084 - DNA, 360 bp, synthetic construct
  misc_feature 1..360: note = NK77.51_CD70_DB03_F02_VH_DNA
  source 1..360: mol_type = other DNA
caggtgcagctggtgcagtctggggctgaggtgaagaagcctggggcctcagtgaaggtttcctgcaaggcatctggatacaccttcaccgattactatgtgcactgggtgcgacaggcccctggacaagggcttgagtggatgggaacgatcaaccctagtggtgggagcacaagctacgcacagaagttccagggcagagtcaccatgaccagggacacgtccacgagcacagtctacatggagctgagcagcctgagatctgaggacacggccgtgtattactgtgctagagaccagggactctggttcaccggttttgactactggggccaagggaccctggtcaccgtctcctca

SEQ ID NO: 1085 - DNA, 360 bp, synthetic construct
  misc_feature 1..360: note = NK77.52_CD70_DB03_F05_VH_DNA
  source 1..360: mol_type = other DNA
caggtgcagctggtgcagtctggggctgaggtgaagaagcctggggcctcagtgaaggtttcctgcaaggcatctggatacaccttcaccgcctaccacatgcactgggtgcgacaggcccctggacaagggcttgagtggatgggaataatcaaccctggagacggtgccacagggtacgcacagaatctccagggcagagtcaccatgaccagggacacgtccacgagcacagtctacatggagctgagcagcctgagatctgaggacacggccgtgtattactgtgctggtgagggcatttccggatcagatgcttttgatatctggggccaagggacattagtcaccgtctcttca

SEQ ID NO: 1086 - DNA, 354 bp, synthetic construct
  misc_feature 1..354: note = NK77.53_CD70_DB03_F06_VH_DNA
  source 1..354: mol_type = other DNA
caggtgcagctggtgcagtctggggctgaggtgaagaagcctgggtcctcggtgaaggtctcctgcaaggcttctggaggcaccttcagcagctatgctatcagctgggtgcgacaggcccctggacaagggcttgagtggatgggatggatgaatcctaactctggtaacacaggttacgcacagaagttccagggcagagtcacgattaccgcggacgaatccacgagcacagcctacatggagctgagcagcctgagatctgaggacacggccgtgtattactgtgcgtggggagtcgatccgtactactttgactactggggccaagggaccctggtcaccgtctcctca

SEQ ID NO: 1087 - DNA, 354 bp, synthetic construct
  misc_feature 1..354: note = NK77.54_CD70_DB03_F09_VH_DNA
  source 1..354: mol_type = other DNA
caggtgcagctggtgcagtctggggctgaggtgaagaagcctggggcctcagtgaaggtttcctgcaaggcatctggatacaccttcaccagctactatatgcactgggtgcgacaggcccctggacaagggcttgagtggatgggaatattcaacccctccgatggtagcacaagctacgcacagaagttccagggcagagtcaccatgaccagggacacgtccacgagcacagtctacatggagctgagcagcctgagatctgaggacacggccgtgtattactgtgctagagatgttggtgagaccacgttcgacccctggggccagggaaccctggtcaccgtctcctca

SEQ ID NO: 1088 - DNA, 369 bp, synthetic construct
  misc_feature 1..369: note = NK77.55_CD70_DB03_F12_VH_DNA
  source 1..369: mol_type = other DNA
caggtgcagctcgttcaaagcggcgccgaggtcaagaaaccaggcgctagcgttaaagttagttgtaaagcctccggctatactttcacatcttacggcatttcttgggtacggcaggcaccggggcagggtttggaatggatggggtggatttccgcctataacggccacacaaattacgcgcagaaattccaggggcgcgttacgatgacacgcgatacctctacctctaccgtttatatggaacttagtagtcttcgttcggaggataccgctgtctactattgcgcacgtgacagtgtacggggttgggactactactacggcatgggggtctggggccaagggaccactgtcaccgtctcctca

SEQ ID NO: 1089 - DNA, 360 bp, synthetic construct
  misc_feature 1..360: note = NK77.56_CD70_DB03_G06_VH_DNA
  source 1..360: mol_type = other DNA
caggtgcagctggtgcagtctggggctgaggtgaagaagcctgggtcttcagtgaaggtttcctgcaaggcatctggatacaccttcatcgactactatatgcactgggtgcgacaggcccctggacaagggcttgagtggatgggatggatgaaccctcacagtggtaacagtgataatgcaccgaagttccagggcagagtcaccatcaccgcagacgagtccacgagcacagcatacatggagctgagcagcctgagatctgaggacacggccgtgtattactgtgctagaggttactccggatacgatctgacggctgactactggggccaagggaccctggtcaccgtctcctca

SEQ ID NO: 1090 - DNA, 387 bp, synthetic construct
  misc_feature 1..387: note = NK77.57_CD70_DB03_G11_VH_DNA
  source 1..387: mol_type = other DNA
caggtgcagctggtgcagtctggggctgaggtgaagaagcctggggcctcagtgaaggtctcctgcaaggcttctggatacaccttcaccggccagtatatgcactgggtgcgacaggcccctggacaagggcttgagtggatgggatggatcaacccgaacactggtgacacaaactatgcacagaagtttcagggcagggtcaccatgaccagggacacgtccaccagcacagtatacatggagctgagcagcctgagatctgaagacacggccgtgtattactgtgcgagagacagcgttttcgaggttgaagggggtactgattattattattactacggtatggatgtctggggccaagggacaatggtcaccgtctcttca

SEQ ID NO: 1091 - DNA, 357 bp, synthetic construct
  misc_feature 1..357: note = NK77.58_CD70_DB03_H08_VH_DNA
  source 1..357: mol_type = other DNA
caggtgcagctggtgcagtctggggctgaggtgaagaagcctggggcctcagtgaaggtttcctgcaaggcatctggatacaccttcaccagctacgacattaattgggtgcgacaggcccctggacaagggcttgagtggatgggagtgatcaaccctagtggtggaggtacaagctacgcacagaagttccagggcagagtcaccatgaccagggacacgtccacgagcacagtctacatggagctgagcagcctgagatctgaggacacggccgtgtattactgtgctagatattctggctatgattgggtgtttgactactggggccaagggaccctggtcaccgtctcctca

SEQ ID NO: 1092 - DNA, 360 bp, synthetic construct
  misc_feature 1..360: note = NK77.59_CD70_DB03_H10_VH_DNA
  source 1..360: mol_type = other DNA
caggtgcagctggtgcagtctggggctgaggtgaagaagcctggggcctcagtgaaggtttcctgcaaggcatctggatacaccttcgctaactactatatgcactgggtgcgacaggcccctggacaagggcttgagtggatgggaataatcaaccctagtggtggtagcacaagctacgcacagaagttccagggcagagtcaccatgaccagggacacgtccacgagcacagtctacatggagctgagcagcctgagatctgaggacacggccgtgtattactgtgctagagatagcggctcctactttggttggttcgacccctggggccagggaaccctggtcaccgtctcctca

SEQ ID NO: 1093 - DNA, 360 bp, synthetic construct
  misc_feature 1..360: note = NK77.60_CD70_DB04_A05_VH_DNA
  source 1..360: mol_type = other DNA
caggtgcagctggtgcagtctggggctgaggtgaagaagcctggggcctcagtgaaggtttcctgcaaggcatctggatacaccttcaccacatactatatgcactgggtgcgacaggcccctggacaagggcttgagtggatgggaataatcaaccctaccggcggtagcacatactacgcacagaagttccagggcagagtcaccatgaccagggacacgtccacgagcacagtctacatggagctgagcagcctgagatctgaggacacggccgtgtattactgtgctagagacagcgggaactatcaagggatctttgactactggggccaagggaccctggtcaccgtctcctca

SEQ ID NO: 1094 - DNA, 357 bp, synthetic construct
  misc_feature 1..357: note = NK77.61_CD70_DB04_A07_VH_DNA
  source 1..357: mol_type = other DNA
caggtgcagctggtgcagtctggggctgaggtgaagaagcctggggcctcagtgaaggtttcctgcaaggcatctggaaataccttcaccagctactatatgcactgggtgcgacaggcccctggacaagggcttgagtggatgggatggatcaaccccaacagtggtgacacaaattacgcacagaacttccagggcagagtcaccatgaccagggacacgtccacgagcacagtctacatggagctgagcagcctgagatctgaggacacggccgtgtattactgtgctagaggtgtcagcggttacgatctatttgactactggggccaagggaccctggtcaccgtctcctca

SEQ ID NO: 1095 - DNA, 342 bp, synthetic construct
  misc_feature 1..342: note = NK77.62_CD70_DB04_A10_VH_DNA
  source 1..342: mol_type = other DNA
gaggtgcagctggtggagtctgggggaggcttggtcaagcctggggggtccctgagactctcctgtgcagcgtctggattcaccttcagtagctatggcatgcactgggtccgccaggctccaggcaaggggctggagtgggtggcatcgataaaacatgatggaagtgagcaatactatgttgactccgtgaagggccgattcaccatctccagagacgattccaagaacacgctgtatctgcaaatgaacagcctgaaaacggaggacacggctgtgtattactgtgcggctagtggagtggatgtctggggccaagggacaaccgtcaccgtctcttca

SEQ ID NO: 1096 - DNA, 366 bp, synthetic construct
  misc_feature 1..366: note = NK77.63_CD70_DB04_A11_VH_DNA
  source 1..366: mol_type = other DNA
caggtgcagctggtgcagtctggggctgaggtgaagaagcctggggcctcagtgaaggtttcctgcaaggcatctggaggtaccttcagtcgttacgacattaattgggtgcgacaggcccctggacaagggcttgagtgggtgggaataatcgatcctacaggtgcgtcaacaagctacgcacagaagttccagggcagagtcaccatgaccagggacacgtccacgagcacagtctacatggagctgagcagcctgagatctgaggacacggccgtgtattactgtgctagagattacagttacgggatggattattatggcatggacgtctggggccaagggaccctggtcaccgtctcctca

SEQ ID NO: 1097 - DNA, 357 bp, synthetic construct
  misc_feature 1..357: note = NK77.64_CD70_DB04_B03_VH_DNA
  source 1..357: mol_type = other DNA
caggtgcagctggtgcagtctggggctgaggtgaagaagcctgggtcctcggtgaaggtctcctgcaaggcttctggatacaccttcaccagctatggaatcagctgggtgcgacaggcccctggacaagggcttgagtggatgggaggtatcatccctatctttggtacaacgaactacgcacagaagttccagggcagagtcacgattaccgcggacgaatccacgagcacagcctacatggagctgagcagcctgagatctgaggacacggccgtgtattactgtgcgagagatcatagcggcgatgggtacttcgatctctggggccgtggcaccctggtcactgtctcctca

SEQ ID NO: 1098 - DNA, 354 bp, synthetic construct
  misc_feature 1..354: note = NK77.65_CD70_DB04_B05_VH_DNA
  source 1..354: mol_type = other DNA
caggtgcagctggtgcagtctggggctgaggtgaagaagcctggggcctcagtgaaggtctcctgcaaggcttctggatacaccttcaccgagaatgagatgcactgggtgcgacaggcccctggacaagggcttgagtggatgggatggatcaacccgaacagtggtggcacaaactatgcacagaagtttcagggcagggtcaccatgaccagggacacgtccactagcacagtgtacatggagctgagctctctgagatctgaagacacggccgtgtattactgtgcggggagctggggtggttactactttgactactggggccaagggaccctggtcaccgtctcctca

SEQ ID NO: 1099 - DNA, 363 bp, synthetic construct
  misc_feature 1..363: note = NK77.66_CD70_DB04_B07_VH_DNA
  source 1..363: mol_type = other DNA
caggtgcagctggtgcagtctggggctgaggtgaagaagcctggggcctcagtgaaggtttcctgcaaggcatctggatacaccttcaccaactactatatctactgggtgcgacaggcccctggacaagggcttgagtggatgggatggatcaaccccaatgacggtgcaacaaattacgcacagaagttccagggcagagtcaccatgaccagggacacgtccacgagcacagtctacatggagctgagcagcctgagatctgaggacacggccgtgtattactgtgctagagaaggcaacgattactattattatttcatggactactggggccaagggaccctggtcaccgtctcctca

SEQ ID NO: 1100 - DNA, 366 bp, synthetic construct
  misc_feature 1..366: note = NK77.67_CD70_DB04_C01_VH_DNA
  source 1..366: mol_type = other DNA
caggtgcagctggtgcagtctggggctgaggtgaagaagcctgggtcctcggtgaaggtctcctgcaaggcttctggaggcaccttcagcagctatgctatcagctgggtgcgacaggcccctggacaagggcttgagtggatgggaggaatcacaccaatgtttggtacaacggactacgcacagaagttccagggcagagtcacgattaccgcggacgaatccacgagcacagcctacatggagctgagcagcctgagatctgaggacacggccgtgtattactgtgcgagagatgagcgggacggatacgccacagtggcttttgatatctggggccaagggacaatggtcaccgtctcttca

SEQ ID NO: 1101 - DNA, 366 bp, synthetic construct
  misc_feature 1..366: note = NK77.68_CD70_DB04_C04_VH_DNA
  source 1..366: mol_type = other DNA
caggtgcagctggtgcagtctggggctgaggtgaagaagcctggggcctcagtgaaggtttcctgcaaggcatctggatacaccttcaccagctactatatgcactgggtgcgacaggcccctggacaagggcttgagtggatgggaataatcaaccctagtgacggaggaacaagctacgcagacaagttccagggcagagtcaccatgaccagggacacgtccacgagcacagtctacatggagctgagcagcctgagatctgaggacacggccgtgtattactgtgctagagcgcttgcccccctgggatggggtgacggcatggatgtctggggccaagggacaacagtcaccgtctcttca

SEQ ID NO: 1102 - DNA, 357 bp, synthetic construct
  misc_feature 1..357: note = NK77.69_CD70_DB04_C06_VH_DNA
  source 1..357: mol_type = other DNA
caggtgcagctggtgcagtctggggctgaggtgaagaagcctgggtcctcggtgaaggtctcctgcaaggcttctggatacaccttcactagctattacatccactgggtgcgacaggcccctggacaagggcttgagtggatgggatggatgaatccctcctcaggtgttacgaacttcgcacagaagttccagggcagagtcacgattaccgcggacgaatccacgagcacagcctacatggagctgagcagcctgagatctgaggacacggccgtgtattactgtgcgagaggttcggaccagggtgactggtctgacccctggggccagggaaccctggtcaccgtctcctca

SEQ ID NO: 1103 - DNA, 366 bp, synthetic construct
  misc_feature 1..366: note = NK77.70_CD70_DB04_C07_VH_DNA
  source 1..366: mol_type = other DNA
caggtgcagctggtgcagtctggggctgaggtgaagaagcctggggcctcagtgaaggtttcctgcaaggcatctggatacaccttcaccgactcctatatacactgggtgcgacaggcccctggacaagggcttgagtggattggatggatgaaccctaatacaggtgacacaggctacgcacagaagttccagggcagagtcaccatgaccagggacacgtccacgagcacagtctacatggagctgagcagcctgagatctgaggacacggccgtgtattactgtgctaaggacgactttggagagcttgctccagccaccttcgacccctggggccagggaaccctggtcaccgtctcctca

SEQ ID NO: 1104 - DNA, 366 bp, synthetic construct
  misc_feature 1..366: note = NK77.71_CD70_DB04_D02_VH_DNA
  source 1..366: mol_type = other DNA
caggtgcagctggtgcagtctggggctgaggtgaagaagcctggggcctcagtgaaggtttcctgcaaggcatctggatacaccttcaccagctacgacatcaattgggtgcgacaggcccctggacaagggcttgagtggatgggagtcatcagccctagtggtggtggaacaagctacgcacagaagttccagggcagagtcaccatgaccagggacacgtccacgagcacagtctacatggagctgagcagcctgagatctgaggacacggccgtgtattactgtgctagatactacggcggcaaccccgaagggtggtacttcgatctctggggccgtggcaccctggtcactgtctcctca

SEQ ID NO: 1105 - DNA, 396 bp, synthetic construct
  misc_feature 1..396: note = NK77.72_CD70_DB04_D05_VH_DNA
  source 1..396: mol_type = other DNA
gaggtgcagctgctggagtctgggggaggcctcgtccagcctgggggctccctgagactctcctgtgcagcctctggattcgttttcgatgactatgctatccactgggtccgccaggctccgggcaaggggctagagtgggtggcagcgatatcatatgatggaagtaataaatactacgcagactccgtgaagggccgattcaccatctccagagacaattccaagaacacgctgtatctgcaaatgaacagcctgagagctgaggacacggctgtgtattactgtgcgagagctccacaatattatgggagtggcaccgacccacttgaggttagatactactactacggcatggacgtgtggggccaagggaccacggtcaccgtctcctca

SEQ ID NO: 1106 - DNA, 366 bp, synthetic construct
  misc_feature 1..366: note = NK77.73_CD70_DB04_D07_VH_DNA
  source 1..366: mol_type = other DNA
caggtgcagctggtgcagtctggggctgaggtgaagaagcctgggtcctcggtgaaggtctcctgcaaggcttctggaggcaccttccgcaattatgctatcagctgggtgcgacaggcccctggacaagggcttgagtggatgggaggtatcatccctatctttggtacagcaaactacgcacagaagttccagggcagagtcacgattaccgcggacgaatccacgagcacagcctacatggagctgagcagcctgagatctgaggacacggccgtgtattactgtgcgagagatcacagtgctgggactcaccacgacgcttttgatatctggggccaagggacaatggtcaccgtctcttca

SEQ ID NO: 1107 - DNA, 351 bp, synthetic construct
  misc_feature 1..351: note = NK77.74_CD70_DB04_D08_VH_DNA
  source 1..351: mol_type = other DNA
caggtgcagctggtgcagtctggggctgaggtgaagaagcctggggcctcagtgaaggtctcctgcaaggcttctggatacaccttcaccagttattatatccactgggtgcgacaggccccgggacaagggcttgagtggatgggatggatgaacccaaacagtggtaacgccggctatgcacagaagttccagggcagagtcaccatgaccagggatacctccacaagcacagtgtacatggagctgagcagcctgagatctgaggacacggccgtgtattactgtgcgagagagtactgggggagctttgactactggggccaagggaccctggtcaccgtctcctca

SEQ ID NO: 1108 - DNA, 354 bp, synthetic construct
  misc_feature 1..354: note = NK77.75_CD70_DB04_D10_VH_DNA
  source 1..354: mol_type = other DNA
caggtgcagctggtgcagtctggggctgaggtgaagaagcctggggcctcagtgaaggtttcctgcaaggcatctggatacaccttcaccggctactatatgcactgggtgcgacaggcccctggacaagggcttgagtggatgggaatgatcgatccaagcgacggtagcacaatttacgcacagaagttccagggcagagtcaccatgaccagggacacgtccacgagcacagtctacatggagctgagcagcctgagatctgaggacacggccgtgtattactgtgctagagagcggccactgtacgcttccgacctgtggggccaagggaccctggtcaccgtctcctca

SEQ ID NO: 1109 - DNA, 357 bp, synthetic construct
  misc_feature 1..357: note = NK77.85_CD70_DB03_B02_VH_DNA
  source 1..357: mol_type = other DNA
caggtgcagctggtgcagtctggggctgaggtgaagaagcctgggtcttcagtgaaggtttcctgcaaggcatctggatacaccttcaccaactactatatgcactgggtgcgacaggcccctggacaagggcttgagtggatgggatggatgaaccccgatagtggtaatacagggtacgcacagaagttccagggcagagtcaccatcaccgctgacgaatccacgagcacagcctacatggagctgagcagcctgagatctgaggacacggccgtgtattactgtgctagaagtagcagctcctggcctgacttcgatctctggggccgtggcaccctggtcactgtctcctca

SEQ ID NO: 1110 - DNA, 360 bp, synthetic construct
  misc_feature 1..360: note = NK77.86_CD70_DB04_A06_VH_DNA
  source 1..360: mol_type = other DNA
caagtccaactcgtacaatccggcgcagaagtcaaaaaacccggcgcaagcgtcaaggtatcatgtaaagctagcgggtatacatttacatcctattccatgcattgggtacgccaagctccaggccagggcctggaatgggtcggtatcattaatcccagttccggctctgccagttatgcgcaaaaatttcaaggaagggtgacaatgactcgagataccagtacctccactgtgtatatggaactgtcctcactaaggagcgaagatactgctgtatactactgcgcacgcgaacgtggggcctatagtagtaccttcgactattggggtcagggcacgttagtgacagtgtcttcc

SEQ ID NO: 1111 - DNA, 360 bp, synthetic construct
  misc_feature 1..360: note = NK77.87_CD70_DB04_A09_VH_DNA
  source 1..360: mol_type = other DNA
caggtgcagctggtgcagtctggggctgaggtgaagaagcctggggcctcagtgaaggtttcctgcaaggcatctggatacaccttcaccgactactatatgcactgggtgcgacaggcccctggacaagggcttgagtggatgggagtcatcaacccctctgatggtacagctcattacgcacagcggctgcagggcagagtcaccatgaccagggacacgtccacgagcacagtctacatggagctgagcagcctgagatctgaggacacggccgtgtattactgtgctagagacagcggatcttactacgctgactttgactactggggccaagggaccctggtcaccgtctcctca

SEQ ID NO: 1112 - DNA, 321 bp, synthetic construct
  misc_feature 1..321: note = NK77.1_CD70_DB01_C03_VL_DNA
  source 1..321: mol_type = other DNA
gacatccagatgacccagtctccatcctccctgtctgcatctgtaggagacagagtcaccatcacttgccgggcaagtcagaatattggcacatatttagcttggtatcagcagaaaccagggaaagcccctaagctcctgatctatgacgcatccaacttggagactggggtcccatcaaggttcagtggcagtggatctgggacagatttcactctcaccatcagcagtctgcaacctgaagattttgcaacttactactgtcaacagagttacagaatccctctcaccttcggccaagggacacgactggagattaaa

SEQ ID NO: 1113 - DNA, 321 bp, synthetic construct
  misc_feature 1..321: note = NK77.2_CD70_DB01_D02_VL_DNA
  source 1..321: mol_type = other DNA
gacatccagatgacccagtctccatcctccctgtctgcatctgtaggagacagagtcaccatcacttgccgggcgagtcagaggattagcaattggttagcctggtatcagcagaaaccagggaaagcccctaagctcctgatctatgatgcatccaacttggaaaccggggtcccatccaggttcagtggcagtggatctgggacggattttactctcaccatcagcagcctgcagcctgaagattttgcaacttattactgtcaacagacctatagtcctccccctacttttggccaggggaccaagctggagatcaaa

SEQ ID NO: 1114 - DNA, 336 bp, synthetic construct
  misc_feature 1..336: note = NK77.3_CD70_DB01_E06_VL_DNA
  source 1..336: mol_type = other DNA
gatattgtgatgactcagtctccactctccctgcccgtcacccctggagagccggcctccatctcctgcaggtctagtcagagcctcctgcactctaacggatacaactatttggattggtacctgcagaagccagggcagtctccacagctcctgatctatgcagcctcttcattacaatccggggtccctgacaggttcagtggcagtggatcaggcacagattttacactgaaaatcagcagagtggaggctgaggatgttggggtttattactgcatgcaagctctacaaactcctatcaccttcggccaagggacacgactggagattaaa

SEQ ID NO: 1115 - DNA, 321 bp, synthetic construct
  misc_feature 1..321: note = NK77.4_CD70_DB01_G04_VL_DNA
  source 1..321: mol_type = other DNA
gacatccagatgacccagtctccatcctccctgtctgcatctgtaggagacagagtcaccatcacttgccgggcaagtcaggacattgacacctatttagcctggtatcagcagaaaccagggaaagcccctaagctcctgatctatgctgcatccagtttgcaaagtggggtcccatcaaggttcagtggcagtggatctgggacagatttcactctcaccatcagcagtctgcaacctgaagattttgcaacttactactgtcaacagagttacacaacccctttcacgttcggccaagggaccaaggtggaaatcaaa

SEQ ID NO: 1116 - DNA, 321 bp, synthetic construct
  misc_feature 1..321: note = NK77.5_CD70_DB01_G05_VL_DNA
  source 1..321: mol_type = other DNA
gacatccagatgacccagtctccatcctccctgtctgcatctgtaggagacagagtcaccatcacttgccaggcaagtcaggacattagcaactatttaaattggtatcagcagaaaccagggaaagcccctaagctcctgatctatgatgcatccagtttggaaagtggggtcccatcaaggttcagtggcagtggatctgggacagatttcactctcaccatcagcagtctgcaacctgaagattttgcaacttactactgtcaacagagttaccgatcacctctcactttcggcggagggaccaaggtggagatcaaa

SEQ ID NO: 1117 - DNA, 321 bp, synthetic construct
  misc_feature 1..321: note = NK77.6_CD70_DB01_G07_VL_DNA
  source 1..321: mol_type = other DNA
gacatccagatgacccagtctccatcctccctgtctgcatctgtaggagacagagtcaccatcacttgccaggcgagtcaggacattagcaactatttaaattggtatcagcagaaaccagggaaagcccctaagctcctgatctacgatgcatccaatttggaaacaggggtcccatcaaggttcagtggaagtggatctgggacagattttactttgaccatcagcagcctgcagcctgaagattttgcaacatattactgtcaacaggcttataggtggcctatcaccttcggccaagggacacgactggagattaaa

SEQ ID NO: 1118 - DNA, 321 bp, synthetic construct
  misc_feature 1..321: note = NK77.7_CD70_DB01_G11_VL_DNA
  source 1..321: mol_type = other DNA
gacatccagatgacccagtctccatcctccctgtctgcatctgtaggagacagagtcaccatcacttgccgggcaagtcagagcattagcagctatttaaattggtatcagcagaaaccagggaaagcccctaagctcctgatctatgatgcatcctacttggaaacaggggtcccatcaaggttcagtggcagtggatctgggacagatttcactctcaccatcagcagtctgcaacctgaagattttgcaacttactactgtcaacagagttacacaattcctcctacgttcggccaagggaccaaggtggaaatcaaa

SEQ ID NO: 1119 - DNA, 321 bp, synthetic construct
  misc_feature 1..321: note = NK77.9_CD70_DB02_A03_VL_DNA
  source 1..321: mol_type = other DNA
gacatccagatgacccagtctccatcctccctgtctgcatctgtaggagacagagtcaccatcacttgccaggcgagtcaggacattagcaactatttaaattggtatcagcagaaaccagggaaagcccctaagctcctgatctacgatgcatccaatttggaaacaggggtcccatcaaggttcagtggaagtggatctgggacagattttactctcaccatcagcagcctgcagcctgaagattttgcaacatattactgtcaacagagctattccacccctctcactttcggccaggggaccaaggtggagatcaaa

SEQ ID NO: 1120 - DNA, 336 bp, synthetic construct
  misc_feature 1..336: note = NK77.10_CD70_DB02_A04_VL_DNA
  source 1..336: mol_type = other DNA
gatattgtgatgactcagtctccactctccctgcccgtcacccctggagagccggcctccatctcctgcaggtctagtcagagcctcctgcattccaacggatacaactatttggattggtacctgcagaagccagggcagtctccacagctcctgatctatcaggcatctagcctggagtccggggtccctgacaggttcagtggcagtggatcaggcacagattttacactgaaaatcagcagagtggaggctgaggatgttggggtttattactgcatgcaaggaacgcactggcctccaactttcggcggagggaccaaggtggagatcaaa

SEQ ID NO: 1121 - DNA, 318 bp, synthetic construct
  misc_feature 1..318: note = NK77.11_CD70_DB02_A05_VL_DNA
  source 1..318: mol_type = other DNA
gacatccagatgacccagtctccatcctccctgtctgcatctgtaggagacagagtcaccatcacttgccaagcaagtcaggacattagcaactatttaaattggtatcagcagaaaccagggaaagcccctaagctcctgatctatgctacctccaccttggctaacggggtcccatcaaggttcagtggcagtggatctgggacagatttcactctcaccatcagcagtctgcaacctgaagattttgcaacttactactgtcaacagagttacagtacgcttaccttcggccaagggacacgactggagattaaa

SEQ ID NO: 1122 - DNA, 321 bp, synthetic construct
  misc_feature 1..321: note = NK77.12_CD70_DB02_A06_VL_DNA
  source 1..321: mol_type = other DNA
gacatccagatgacccagtctccatcctccctgtctgcatctgtaggagacagagtcaccatcacttgccaggcgagtcaggacattagcaactatttaaattggtatcagcagaaaccagggaaagcccctaagctcctgatctacgatgcatccaatttggaaacaggggtcccatcaaggttcagtggaagtggatctgggacagattttactctgaccatcagcagcctgcagcctgaagattttgcaacatattactgtcaacagtcttacagtacgcctcctacgttcggccaagggaccaaggtggaaatcaaa

SEQ ID NO: 1123 - DNA, 321 bp, synthetic construct
  misc_feature 1..321: note = NK77.13_CD70_DB02_A07_VL_DNA
  source 1..321: mol_type = other DNA
gacatccagatgacccagtctccatcctccctgtctgcatctgtaggagacagagtcaccatcacttgccgggcaagtcagagcattgacaattggttagcgtggtatcagcagaaaccagggaaagcccctaagctcctgatctatgctgcatccacattgcaaagtggggtcccatcaaggttcagtggcagtggatctgggacagatttcactctcaccatcagcagtctgcaacctgaagattttgcaacttactactgtcaacagagttacgatagtcctcccacttttggccaggggaccaagctggagatcaaa

SEQ ID NO: 1124 - DNA, 321 bp, synthetic construct
  misc_feature 1..321: note = NK77.14_CD70_DB02_A08_VL_DNA
  source 1..321: mol_type = other DNA
gacatccagatgacccagtctccatcctccctgtctgcatctgtaggagacagagtcaccatcacttgccaggcgagtcaggacattagcaactatttaaattggtatcagcagaaaccagggaaagcccctaagctcctgatctacgatgcatccaatttggaaacaggggtcccatcaaggttcagtggaagtggatctgggacagattttactttgaccatcagcagcctgcagcctgaagattttgcaacatattactgtcaacagtcctatagcacccctctcactttcggcggagggaccaaggtggagatcaaa

SEQ ID NO: 1125 - DNA, 321 bp, synthetic construct
  misc_feature 1..321: note = NK77.15_CD70_DB02_A09_VL_DNA
  source 1..321: mol_type = other DNA
gacatccagatgacccagtctccatcctccctgtctgcatctgtaggagacagagtcaccatcacttgccaggcgagtcaggacattagcaactatttaaattggtatcagcagaaaccagggaaagcccctaagctcctgatctacgatgtgtccaatttggaaacaggggtcccatcaaggttcagtggaagtggatctgggacagattttactctcaccatcagcagcctgcagcctgaagattttgcaacatattactgtcaacaggctaattccttccctctcactttcggcggagggaccaaggtggagatcaaa

SEQ ID NO: 1126 - DNA, 321 bp, synthetic construct
  misc_feature 1..321: note = NK77.16_CD70_DB02_A11_VL_DNA
  source 1..321: mol_type = other DNA
gacatccagatgacccagtctccatcctccctgtctgcatctgtaggagacagagtcaccatcacttgccgggcaagtcagaccattagcaattatttaaattggtatcagcagaaaccagggaaagcccctaagctcctgatctatgacgcatccagtttggaaagtggggtcccatcaaggttcagtggcagtggatctgggacagatttcactctcaccatcagcagtctgcaacctgaagattttgcaacttactactgtcaacaggcaatcagttttcctctcactttcggcggagggaccaaggtggagatcaaa

SEQ ID NO: 1127 - DNA, 321 bp, synthetic construct
  misc_feature 1..321: note = NK77.17_CD70_DB02_B06_VL_DNA
  source 1..321: mol_type = other DNA
gacatccagatgacccagtctccatcctccctgtctgcatctgtaggagacagagtcaccatcacttgccgggcaagtcagagcattagcagctatttaaattggtatcagcagaaaccagggaaagcccctaagctcctgatctatgacgcatccaatttggccaccggggtcccatcaaggttcagtggcagtggatctgggacagatttcactctcaccatcagcagtctgcaacctgaagattttgcaacttactactgtcaacagagtgatagttcacctctcactttcggccaagggaccaaggtggagatcaaa

SEQ ID NO: 1128 - DNA, 321 bp, synthetic construct
  misc_feature 1..321: note = NK77.18_CD70_DB02_B09_VL_DNA
  source 1..321: mol_type = other DNA
gacatccagatgacccagtctccatcctccctgtctgcatctgtaggagacagagtcaccatcacttgccaggcaagtcaggacattagcaattatttaaattggtatcagcagaaaccagggaaagcccctaagctcctgatctatggtgcaacgacattgcaaagtggggtcccatcaaggttcagtggcagtggatctgggacagatttcactctcaccatcagcagtctgcaacctgaagattttgcaacttactactgtcaacaggcggatagttttccttacacttttggccaggggaccaagctggagatcaaa

SEQ ID NO: 1129 - DNA, 321 bp, synthetic construct
  misc_feature 1..321: note = NK77.19_CD70_DB02_C03_VL_DNA
  source 1..321: mol_type = other DNA
gacatccagatgacccagtctccatcctccctgtctgcatctgtaggagacagagtcaccatcacttgcagggcgagtcagactattgacatctatttaaattggtatcagcagaaaccagggaaagcccctaagctcctgatctacgatgcatccaatttggaaacaggggtcccatcaaggttcagtggaagtggatctgggacagattttactttgaccatcagcagcctgcagcctgaagattttgcaacatattactgtcaacaggcagattccttccctctcactttcggcggagggaccaaggtggagatcaaa

SEQ ID NO: 1130 - DNA, 321 bp, synthetic construct
  misc_feature 1..321: note = NK77.20_CD70_DB02_C04_VL_DNA
  source 1..321: mol_type = other DNA
gacatccagatgacccagtctccatcttctctgtctgcatctgtaggagacagagtcaccatcacttgtcgggcgagtcagggtattagcaacaacttaaattggtatcagcagaaaccagggaaagcccctaagctcctgatctatgctgcatccagtttgcacagtggggtcccatcaaggttcagcggcagtggatctgggacagatttcactctcactatcagcagcctgcagcctgaagattttgcaacttactattgtcaacaggctgatgctttccctctcactttcggcggagggaccaaggtggagatcaaa

SEQ ID NO: 1131 - DNA, 321 bp, synthetic construct
  misc_feature 1..321: note = NK77.22_CD70_DB02_C07_VL_DNA
  source 1..321: mol_type = other DNA
gacatccagatgacccagtctccatcctccctgtctgcatctgtaggagacagagtcaccatcacttgccgggcaagtcagagcattggaacctggttagcctggtatcagcagaaaccagggaaagcccctaagctcctgatctatgctgcatccagtttgcaaagtggggtcccatcaaggttcagtggcagtggatctgggacagatttcactctcaccatcagcagtctgcaacctgaagattttgcaacttactactgtcaacagagttacaccacccctattacgttcggccaagggaccaaggtggaaatcaaa

SEQ ID NO: 1132 - DNA, 321 bp, synthetic construct
  misc_feature 1..321: note = NK77.24_CD70_DB02_D02_VL_DNA
  source 1..321: mol_type = other DNA
gaaatagtgatgacgcagtctccagccaccctgtctgtgtctccaggggaaagagccaccctctcctgcagggccagtcagagtgttagcagctacttagcctggtaccagcagaaacctggccaggctcccaggctcctcatctatggtgcatccaccagggccactggtatcccagccaggttcagtggcagtgggtctgggacagagttcactctcaccatcagcagcctgcagtctgaagattttgcagtttattactgtcagcagtatgatagctatcctccaactttcggcggagggaccaaggtggagatcaaa

SEQ ID NO: 1133 - DNA, 321 bp, synthetic construct
  misc_feature 1..321: note = NK77.25_CD70_DB02_D04_VL_DNA
  source 1..321: mol_type = other DNA
gacatccagatgacccagtctccatcctccctgtctgcatctgtaggagacagagtcaccatcacttgccaggcaagtcaggacattagcaattatttaaattggtatcagcagaaaccagggaaagcccctaagctcctgatctatgctgcatccaccttggaaagtggggtcccatcaaggttcagtggcagtggatctgggacagatttcactctcaccatcagcagtctgcaacctgaagattttgcaacttactactgtcttcaggattacgactaccctctgacttttggccaggggaccaagctggagatcaaa

SEQ ID NO: 1134 - DNA, 321 bp, synthetic construct
  misc_feature 1..321: note = NK77.26_CD70_DB02_D10_VL_DNA
  source 1..321: mol_type = other DNA
gacatccagatgacccagtctccatcttctctctctgcatctgtaggagacagagtcaccatcacttgtcgggcgagtcagacaatttataagtggttagcctggtatcagcagaaaccagggaaagcccctaagctcctgatctatgacgcatccagtttggaaagtggggtcccatcaaggttcagcggcagtggatctgggacagatttcactctcactatcagcagcctgcagcctgaagattttgcaacttactattgtcaacaggctaacagtttccctttcactttcggccctgggaccaaagtggatatcaaa

SEQ ID NO: 1135 - DNA, 321 bp, synthetic construct
  misc_feature 1..321: note = NK77.27_CD70_DB02_D11_VL_DNA
  source 1..321: mol_type = other DNA
gacatccagatgacccagtctccatcctccctgtctgcatctgtaggagacagagtcaccatcacttgccaggcgagtcaggacattagcaactatttaaattggtatcagcagaaaccagggaaagcccctaagctcctgatctacgatgcatccaatttggaaacaggggtcccatcaaggttcagtggaagtggatctgggacagattttactctgaccatcagcagcctgcagcctgaagatttcgcaacatattactgtcaacaggcccactcgtttcctcccacgttcggccaagggaccaaggtggaaatcaaa

SEQ ID NO: 1136 - DNA, 321 bp, synthetic construct
  misc_feature 1..321: note = NK77.28_CD70_DB02_E04_VL_DNA
  source 1..321: mol_type = other DNA
gacatccagatgacccagtctccatcctccctgtctgcatctgtaggagacagagtcaccatcacttgccgggcaagtaccagcattagcgattatgtgcattggtatcagcagaaaccagggaaagcccctaagctcctgatctatgatgcatccagtttgcaaagtggggtcccatcaaggttcagtggcagtggatctgggacagatttcactctcaccatcagcagtctgcaacctgaagattttgcaacttactactgtcaacagagtgatagtacccctcccactttcggcggagggaccaaggtggagatcaaa

SEQ ID NO: 1137 - DNA, 321 bp, synthetic construct
  misc_feature 1..321: note = NK77.29_CD70_DB02_F06_VL_DNA
  source 1..321: mol_type = other DNA
gacatccagatgacccagtctccatcctccctgtctgcatctgtaggagacagagtcaccatcacttgccgggcaagtcagggaattagcaataatttaaattggtatcagcagaaaccagggaaagcccctaagctcctgatctattacgcatccaccttgcaaagtggggtcccatcaaggttcagtggcagtggatctgggacagatttcactctcaccatcagcagtctgcaacctgaagattttgcaacttactactgtcaacagagttacagtacccctatcaccttcggccaagggacacgactggagattaaa

SEQ ID NO: 1138 - DNA, 321 bp, synthetic construct
  misc_feature 1..321: note = NK77.31_CD70_DB02_F08_VL_DNA
  source 1..321: mol_type = other DNA
gacatccagatgacccagtctccatcctccctgtctgcatctgtaggagacagagtcaccatcacttgccgggcaagtcagacgattagcaattatttaaattggtatcagcagaaaccagggaaagcccctaagctcctgatctatgatgcatccacgttggaagccggggtcccatcaaggttcagtggcagtggatctgggacagatttcactctcaccatcagcagtctgcaacctgaagattttgcaacttactactgtcaacagagttacaaccctccatacacttttggccaggggaccaagctggagatcaaa

SEQ ID NO: 1139 - DNA, 321 bp, synthetic construct
  misc_feature 1..321: note = NK77.32_CD70_DB02_G07_VL_DNA
  source 1..321: mol_type = other DNA
gacatccagatgacccagtctccatcctccctgtctgcatctgtaggagacagagtcaccatcacttgccgggcaagtcagagcattagcacttatttaaattggtatcagcagaaaccagggaaagcccctaagctcctgatctatgatgcatccaacttggagatcggggtcccatcaaggttcagtggcagtggatctgggacagatttcactctcaccatcagcagtctgcaacctgaagattttgcaacttactactgtcaacagagtgacagttcaccactcactttcggccaggggaccaaggtggagatcaaa

SEQ ID NO: 1140 - DNA, 321 bp, synthetic construct
  misc_feature 1..321: note = NK77.33_CD70_DB02_H04_VL_DNA
  source 1..321: mol_type = other DNA
gacatccagatgacccagtctccatcctccctgtctgcatctgtaggagacagagtcaccatcacttgccaagcaagtcaggatattagcaactatttaaattggtatcagcagaaaccagggaaagcccctaagctcctgatctatgctgcatccagtttgcaaagtggggtcccatcaaggttcagtggcagtggatctgggacagatttcactctcaccatcagcagtctgcaacctgaagattttgcaacttactactgtcaacagagttaccggacccctctcactttcggcggagggaccaaggtggagatcaaa

SEQ ID NO: 1141 - DNA, 321 bp, synthetic construct
  misc_feature 1..321: note = NK77.34_CD70_DB02_H05_VL_DNA
  source 1..321: mol_type = other DNA
gacatccagatgacccagtctccatcctccctgtctgcatctgtaggagacagagtcaccatcacttgccgggcaagtcaggatattcgcaacgatttagggtggtatcagcagaaaccagggaaagcccctaagctcctgatctatgctgcatccaacttggagaccggggtcccatcaaggttcagtggcagtggatctgggacagatttcactctcaccatcagcagtctgcaacctgaagattttgcaacttactactgtcaacagagttacagtgcacctttcactttcggccctgggaccaaagtggatatcaaa

SEQ ID NO: 1142 - DNA, 321 bp, synthetic construct
  misc_feature 1..321: note = NK77.35_CD70_DB02_H08_VL_DNA
  source 1..321: mol_type = other DNA
gacatccagatgacccagtctccatcctccctgtctgcatctgtaggagacagagtcaccatcacttgccgggcaagtcaggagattagcaactatttagcctggtatcagcagaaaccagggaaagcccctaagctcctgatctatgatgcatccaacttgcaaactggggtcccatcaaggttcagtggcagtggatctgggacagatttcactctcaccatcagcagtctgcaacctgaagattttgcaacttactactgtcaacagagttacagtacccctttcactttcggccctgggaccaaagtggatatcaaa

SEQ ID NO: 1143 - DNA, 321 bp, synthetic construct
  misc_feature 1..321: note = NK77.36_CD70_DB03_A06_VL_DNA
  source 1..321: mol_type = other DNA
gacatccagatgacccagtctccatcctccctgtctgcatctgtaggagacagagtcaccatcacttgccaggcaagtcaggacattagcgattctttaaattggtatcagcagaaaccagggaaagcccctaagctcctgatctattccgcatccagtttgcaaagtggggtcccatcaaggttcagtggcagtggatctgggacagatttcactctcaccatcagcagtctgcaacctgaagattttgcaacttactactgtcaacagagttttacaaccccttatacgttcggccaagggaccaaggtggaaatcaaa

SEQ ID NO: 1144 - DNA, 321 bp, synthetic construct
  misc_feature 1..321: note = NK77.37_CD70_DB03_A07_VL_DNA
  source 1..321: mol_type = other DNA
gacatccagatgacccagtctccatcttctctgtctgcatctgtaggagacagagtcaccatcacttgtcgggcgagtcagtctattagcagctggttagcctggtatcagcagaaaccagggaaagcccctaagctcctgatctatgatgcatccaatttggaaacaggggtcccatcaaggttcagcggcagtggatctgggacagatttcactctcactatcagcagcctgcagcctgaagattttgcaacttactattgtcaacagaatttcagtcctcctctcaccttcggccaagggacacgactggagattaaa

SEQ ID NO: 1145 - DNA, 321 bp, synthetic construct
  misc_feature 1..321: note = NK77.38_CD70_DB03_A08_VL_DNA
  source 1..321: mol_type = other DNA
gacatccagatgacccagtctccatcctccctgtctgcatctgtaggagacagagtcaccatcacttgccgggcaagtcaggacattcggcattatttagcatggtatcagcagaaaccagggaaagcccctaagctcctgatctatgacgcatccagtttgcaaagtggggtcccatcaaggttcagtggcagtggatctgggacagatttcactctcaccatcagcagtctgcaacctgaagattttgcaacttactactgtcaacagacctacgacgcacctatcaccttcggccaagggacacgactggagattaaa

SEQ ID NO: 1146 - DNA, 321 bp, synthetic construct
  misc_feature 1..321: note = NK77.39_CD70_DB03_A09_VL_DNA
  source 1..321: mol_type = other DNA
gacatcgtgatgacccagtctccagactccctggctgtgtctctgggcgagagggccaccatcaactgccgggccagctctagtatttccaactacttagcttggtaccagcagaaaccaggacagcctcctaagctgctcatttacggcgcatctacccgggcttccggggtccctgaccgattcagtggcagcgggtctgggacagatttcactctcaccatcagcagcctgcaggctgaagatgtggcagtttattactgtcagcaaagctatagtactcctctcactttcggccaggggaccaaggtggagatcaaa

SEQ ID NO: 1147 - DNA, 321 bp, synthetic construct
  misc_feature 1..321: note = NK77.40_CD70_DB03_A11_VL_DNA
  source 1..321: mol_type = other DNA
gacatccagatgacccagtctccatcctccctgtctgcatctgtaggagacagagtcaccatcacttgccgggcgagtcagggcattaccaattttttagcctggtatcagcagaaaccagggaaagcccctaagctcctgatatatgatgcatccaacttggaaaccggggtcccatccaggttcagtggcagtggatctgggacggatttcactctcaccatcagcagcctgcagcctgaagattttgcaacttattactgtcaacagagctatggggcccctcttaccttcggccaagggacacgactggagattaaa

SEQ ID NO: 1148 - DNA, 321 bp, synthetic construct
  misc_feature 1..321: note = NK77.41_CD70_DB03_A12_VL_DNA
  source 1..321: mol_type = other DNA
gacatccagatgacccagtctccatcctccctgtctgcatctgtaggagacagagtcaccatcacttgccaagcaagtcaggacattagcaactatttaaattggtatcagcagaaaccagggaaagcccctaagctcctgatctattccgcatccaccttgcaaagtggggtcccatcaaggttcagtggcagtggatctgggacagatttcactctcaccatcagcagtctgcaacctgaagattttgcaacttactactgtcaacagagttacagttctccttatagattcggccaagggaccaaggtggaaatcaaa

SEQ ID NO: 1149 - DNA, 336 bp, synthetic construct
  misc_feature 1..336: note = NK77.42_CD70_DB03_B01_VL_DNA
  source 1..336: mol_type = other DNA
gatattgtgatgactcagtctccactctccctgcccgtcacccctggagagccggcctccatctcctgcaggtctagtcagagcctcctccactctaatggctacaactatttggattggtacctgcagaagccagggcagtctccacagctcctgatctatgcagcttctagtctccagtccggggtccctgacaggttcagtggcagtggatcaggcacagattttacactgaaaatcagcagagtggaggctgaggatgttggggtttattactgcatgcaaggggcccattggcctccgacttttggccaggggaccaagctggagatcaaa

SEQ ID NO: 1150 - DNA, 321 bp, synthetic construct
  misc_feature 1..321: note = NK77.43_CD70_DB03_B04_VL_DNA
  source 1..321: mol_type = other DNA
gacatccagatgacccagtctccatcctccctgtctgcatctgtaggagacagagtcaccatcacttgccgggcaagtcaggacattagggatgggttaggctggtatcagcagaaaccagggaaagcccctaagctcctgatctatgctgcatccactttgcaaagtggggtcccatcaaggttcagtggcagtggatctgggacagatttcactctcaccatcagcagtctgcaacctgaagattttgcaacttactactgtcaacagagttacgggacccctcctacgttcggccaagggaccaaggtggaaatcaaa

SEQ ID NO: 1151 - DNA, 318 bp, synthetic construct
  misc_feature 1..318: note = NK77.44_CD70_DB03_B06_VL_DNA
  source 1..318: mol_type = other DNA
gaaatagtgatgacgcagtctccagccaccctgtctgtgtctccaggggaaagagccaccctctcctgcagggccagtcagagtgttagcagctatttagcctggtaccagcagaaacctggccaggctcccaggctcctcatctatggtgcatccaccagggccactggtatcccagccaggttcagtggcagtgggtctgggacagagttcactctcaccatcagcagcctgcagtctgaagattttgcagtttattactgtcagcagtatgattcctcccctacgttcggccaagggaccaaggtggaaatcaaa

SEQ ID NO: 1152 - DNA, 321 bp, synthetic construct
  misc_feature 1..321: note = NK77.45_CD70_DB03_B09_VL_DNA
  source 1..321: mol_type = other DNA
gacatccagatgacccagtctccatcctccctgtctgcatctgtaggagacagagtcaccatcacttgccgggcaagtcagagcattagcagctatttaaattggtatcagcagaaaccagggaaagcccctaagctcctgatctatgatgcatccaacttggaaaccggggtcccatcaaggttcagtggcagtggatctgggacagatttcactctcaccatcagcagtctgcaacctgaagattttgcaacttactactgtcaacagagtcacagtgcgcctatcaccttcggccaagggacacgactggagattaaa

SEQ ID NO: 1153 - DNA, 321 bp, synthetic construct
  misc_feature 1..321: note = NK77.46_CD70_DB03_C05_VL_DNA
  source 1..321: mol_type = other DNA
gacatccagatgacccagtctccatcctccctgtctgcatctgtaggagacagagtcaccatcacttgccgggcaagtcagagcattagcacaaacttagcttggtatcagcagaaaccagggaaagcccctaagctcctgatctatgatgcatcctatttggaggctggggtcccatcaaggttcagtggcagtggatctgggacagatttcactctcaccatcagcagtctgcaacctgaagattttgcaacttactactgtcaacagagttacagtacccctccgacttttggccaggggaccaagctggagatcaaa

SEQ ID NO: 1154 - DNA, 339 bp, synthetic construct
  misc_feature 1..339: note = NK77.47_CD70_DB03_D11_VL_DNA
  source 1..339: mol_type = other DNA
gacatcgtgatgacccagtctccagactccctggctgtgtctctgggcgagagggccaccatcaactgcaagtccagccagagtgttttatattccagtaataacaagaactacttagcttggtaccagcagaaaccaggacagcctcctaagctgctcatttactgggcatctacccgggattccggggtccctgaccgattcagtggcagcgggtctgggacagatttcactctcaccatcagcagcctgcaggctgaagatgtggcagtttattactgtcagcaatattatggcttccctcccaccttcggccaagggacacgactggagattaaa

SEQ ID NO: 1155 - DNA, 321 bp, synthetic construct
  misc_feature 1..321: note = NK77.48_CD70_DB03_E01_VL_DNA
  source 1..321: mol_type = other DNA
gacatccagatgacccagtctccatcctccctgtctgcatctgtaggagacagagtcaccatcacttgccaagcaagtcacgacattagcaaattcttaaattggtatcagcagaaaccagggaaagcccctaagctcctgatctatgatgcatccaatttgcaacgaggggtcccatcaaggttcagtggcagtggatctgggacagatttcactctcaccatcagcagtctgcaacctgaagattttgcaacttactactgtcaacagacctacagtttccctttcacttttggccaggggaccaagctggagatcaaa

SEQ ID NO: 1156 - DNA, 336 bp, synthetic construct
  misc_feature 1..336: note = NK77.49_CD70_DB03_E03_VL_DNA
  source 1..336: mol_type = other DNA
gatattgtgatgactcagtctccactctccctgcccgtcacccctggagagccggcctccatctcctgcaggtctagtcagagcctcctccattcaaacgggtacaactatttggattggtacctgcagaagccagggcagtctccacagctcctgatctatgatgcctcttcccttcagtccggggtccctgacaggttcagtggcagtggatcaggcacagattttacactgaaaatcagcagagtggaggctgaggatgttggggtttattactgcatgcaagctcggcaaactcctctgaccttcggccaagggacacgactggagattaaa

SEQ ID NO: 1157 - DNA, 336 bp, synthetic construct
  misc_feature 1..336: note = NK77.50_CD70_DB03_E09_VL_DNA
  source 1..336: mol_type = other DNA
gatattgtgatgactcagtctccactctccctgcccgtcacccctggagagccggcctccatctcctgcaggtctagtcagagcctcctgcattcaaatggttacaactatttggattggtacctgcagaagccagggcagtctccacagctcctgatctatgctgcttctaatttacagggtggggtccctgacaggttcagtggcagtggatcaggcacagattttacactgaaaatcagcagagtggaggctgaggatgttggggtttattactgcatgcaaacactagagtcccctgtaactttcggcggagggaccaaggtggagatcaaa

SEQ ID NO: 1158 - DNA, 321 bp, synthetic construct
  misc_feature 1..321: note = NK77.51_CD70_DB03_F02_VL_DNA
  source 1..321: mol_type = other DNA
gacatccagatgacccagtctccatcctccctgtctgcatctgtaggagacagagtcaccatcacttgccgggcaagtcagggcattagcaacaatttaaattggtatcagcagaaaccagggaaagcccctaagctcctgatctatgatgcatccaacttggaacgtggggtcccatcaaggttcagtggcagtggatctgggacagatttcactctcaccatcagcagtctgcaacctgaagattttgcaacttactactgtcaacagagttacgacggtcctatcaccttcggccaagggacacgactggagattaaa

SEQ ID NO: 1159 - DNA, 321 bp, synthetic construct
  misc_feature 1..321: note = NK77.52_CD70_DB03_F05_VL_DNA
  source 1..321: mol_type = other DNA
gacatccagatgacccagtctccatcctccctgtctgcatctgtaggagacagagtcaccatcacttgccgggcaagtcagagcattagcagctggttagcttggtatcagcagaaaccagggaaagcccctaagctcctgatctatgctgcatccagtttgcaaagtggggtcccatcaaggttcagtggcagtggatctgggacagatttcactctcaccatcagcagtctgcaacctgaagattttgcaacttactactgtttgcaggactacagttatcctctcactttcggcggagggaccaaggtggagatcaaa

SEQ ID NO: 1160 - DNA, 321 bp, synthetic construct
  misc_feature 1..321: note = NK77.53_CD70_DB03_F06_VL_DNA
  source 1..321: mol_type = other DNA
gacatccagatgacccagtctccatcctccctgtctgcatctgtaggagacagagtcaccatcacttgccgggcaagtcagagcattaacaggtggttagcgtggtatcagcagaaaccagggaaagcccctaagctcctgatctatgacgcatccaatttggagaccggggtcccatcaaggttcagtggcagtggatctgggacagatttcactctcaccatcagcagtctgcaacctgaagattttgcaacttactactgtcaacagagttacattacccctctcactttcggcggagggaccaaggtggagatcaaa

SEQ ID NO: 1161 - DNA, 321 bp, synthetic construct
  misc_feature 1..321: note = NK77.54_CD70_DB03_F09_VL_DNA
  source 1..321: mol_type = other DNA
gacatccagatgacccagtctccatcctccctgtctgcatctgtaggagacagagtcaccatcacttgccaggcaagtcaggatattagcaactatttaaattggtatcagcagaaaccagggaaagcccctaagctcctgatctatgacgcatccagtttggaaagtggggtcccatcaaggttcagtggcagtggatctgggacagatttcactctcaccatcagcagtctgcaacctgaagattttgcaacttactactgtcaacagactaatagttttcctatcaccttcggccaagggacacgactggagattaaa

SEQ ID NO: 1162 - DNA, 321 bp, synthetic construct
  misc_feature 1..321: note = NK77.55_CD70_DB03_F12_VL_DNA
  source 1..321: mol_type = other DNA
gacatccagatgacccagtctccatcctccctgtctgcatctgtaggagacagagtcaccatcacttgccaggcaagtcaggacattagaaacttcttaaattggtatcagcagaaaccagggaaagcccctaagctcctgatctatgctgcatccacgttgcaaagtggggtcccatcaaggttcagtggcagtggatctgggacagatttcactctcaccatcagcagtctgcaacctgaagattttgcaacttactactgtcaacagagttacagtgcccctagcacttttggccaggggaccaagctggagatcaaa

SEQ ID NO: 1163 - DNA, 321 bp, synthetic construct
  misc_feature 1..321: note = NK77.56_CD70_DB03_G06_VL_DNA
  source 1..321: mol_type = other DNA
gacatccagatgacccagtctccatcctccctgtctgcatctgtaggagacagagtcaccatcacttgccgggcaagtcagagcattagcaattatttaaattggtatcagcagaaaccagggaaagcccctaagctcctgatctatgacgcatccaacttggagaccggggtcccatcaaggttcagtggcagtggatctgggacagatttcactctcaccatcagcagtctgcaacctgaagattttgcaacttactactgtcaacagagttacagtacccctatcaccttcggccaagggacacgactggagattaaa

SEQ ID NO: 1164 - DNA, 321 bp, synthetic construct
  misc_feature 1..321: note = NK77.57_CD70_DB03_G11_VL_DNA
  source 1..321: mol_type = other DNA
gacatccagatgacccagtctccatcctccctgtctgcatctgtaggagacagagtcaccatcacttgccgggcaagtgaaaccattagcggctggttagcctggtatcagcagaaaccagggaaagcccctaagctcctgatctatgacgcatccaacttggagactggggtcccatcaaggttcagtggcagtggatctgggacagatttcactctcaccatcagcagtctgcaacctgaagattttgcaacttactactgtcaacagagttacagtaccccttggacgttcggccaagggaccaagctggaaatcaaa

SEQ ID NO: 1165 - DNA, 321 bp, synthetic construct
  misc_feature 1..321: note = NK77.58_CD70_DB03_H08_VL_DNA
  source 1..321: mol_type = other DNA
gacatccagatgacccagtctccatcctccctgtctgcatctgtaggagacagagtcaccatcacttgccgggcaagtcagggcattggcagctggttagcttggtatcagcagaaaccagggaaagcccctaagctcctgatctatgctgcatccacattgcaaagtggggtcccatcaaggttcagtggcagtggatctgggacagatttcactctcaccatcagcagtctgcaacctgaagattttgcaacttactactgtcaacagagttacagtaccccttggactttcggccctgggaccaaagtggatatcaaa

SEQ ID NO: 1166 - DNA, 321 bp, synthetic construct
  misc_feature 1..321: note = NK77.59_CD70_DB03_H10_VL_DNA
  source 1..321: mol_type = other DNA
gacatccagatgacccagtctccatcctccctgtctgcatctgtaggagacagagtcaccatcacttgccgggcaagtcagagcattagcagctctttagcatggtatcagcagaaaccagggaaagcccctaagctcctgatctatgatgcatccagtttgcaaagtggggtcccatcaaggttcagtggcagtggatctgggacagatttcactctcaccatcagcagtctgcaacctgaagattttgcaacttactactgtcaacagagttacaacacccctcccactttcggcggagggaccaagctggagatcaaa

SEQ ID NO: 1167 - DNA, 321 bp, synthetic construct
  misc_feature 1..321: note = NK77.60_CD70_DB04_A05_VL_DNA
  source 1..321: mol_type = other DNA
gacatccagatgacccagtctccatcctccctgtctgcatctgtaggagacagagtcaccatcacttgccgggcaagtcaggggattggcggctatttagcctggtatcagcagaaaccagggaaagcccctaagctcctgatctatgatgcatccaatttggagaccggggtcccatcaaggttcagtggcagtggatctgggacagatttcactctcaccatcagcagtctgcaacctgaagattttgcaacttactactgtcaacagagttacgactcccctcccaccttcggccaagggacacgactggagattaaa

SEQ ID NO: 1168 - DNA, 321 bp, synthetic construct
  misc_feature 1..321: note = NK77.61_CD70_DB04_A07_VL_DNA
  source 1..321: mol_type = other DNA
gacatccagatgacccagtctccatcctccctgtctgcatctgtaggagacagagtcaccatcacttgccgggcaagtcagagcgtgagcagctatttaaattggtatcagcagaaaccagggaaagcccctaagctcctgatctatgatacgtccaacttggagacgggggtcccatcaaggttcagtggcagtggatctgggacagatttcactctcaccatcagcagtctgcaacctgaagattttgcaacttactactgtcaacaggctcatagttttcctctcactttcggcggagggaccaaggtggagatcaaa

SEQ ID NO: 1169 - DNA, 336 bp, synthetic construct
  misc_feature 1..336: note = NK77.62_CD70_DB04_A10_VL_DNA
  source 1..336: mol_type = other DNA
gatattgtgatgactcagtctccactctccctgcccgtcacccctggagagccggcctccatctcctgcaggtctagtcagagcctcctgcacagcaatggctacaactatttggattggtacctgcagaagccagggcagtctccacagctcctgatctatttgggttctacccgggcctccggggtccctgacaggttcagtggcagtggatcaggcacagattttacactgaaaatcagcagagtggaggctgaggatgttggggtttattactgcatgcaagctctagatactcctctcactttcggcggagggaccaagttagagatcaaa

SEQ ID NO: 1170 - DNA, 321 bp, synthetic construct
  misc_feature 1..321: note = NK77.63_CD70_DB04_A11_VL_DNA
  source 1..321: mol_type = other DNA
gacatccagatgacccagtctccatcctccctgtctgcatctgtaggagacagagtcaccatcacttgccaggcgagtcaggacattagcaactatttaaattggtatcagcagaaaccagggaaagcccctaagctcctgatctacgatacctccaatttgcagacaggggtcccatcaaggttcagtggaagtggatctgggacagattttactcttaccatcagcagcctgcagcctgaagattttgcaacatattacctgagcacagatctgcagaccaccgctcacttcggccaagggaccaaggtggaaatcaaa

SEQ ID NO: 1171 - DNA, 336 bp, synthetic construct
  misc_feature 1..336: note = NK77.64_CD70_DB04_B03_VL_DNA
  source 1..336: mol_type = other DNA
gatattgtgatgactcagtctccactctccctgcccgtcacccctggagagccggcctccatctcctgcaggtctagtcagagcctcctgcactccaacggatacaactatttggattggtacctgcagaagccagggcagtctccacagctcctgatctatgatgcctcttcacttcagtccggggtccctgacaggttcagtggcagtggatcaggcacagattttacactgaaaatcagcagagtggaggctgaggatgttggggtttattactgcatgcaaggaacacactggcctcccacgttcggccaagggaccaaggtggaaatcaaa

SEQ ID NO: 1172 - DNA, 321 bp, synthetic construct
  misc_feature 1..321: note = NK77.65_CD70_DB04_B05_VL_DNA
  source 1..321: mol_type = other DNA
gacatccagatgacccagtctccatcctccctgtctgcatctgtaggagacagagtcaccatcacttgccgggcaagtcagagcgttagcagatatttaaattggtatcagcagaaaccagggaaagcccctaagctcctgatctatgatgcatccaatttggaaaccggggtcccatcaaggttcagtggcagtggatctgggacagatttcactctcaccatcagcagtctgcaacctgaagattttgcaacttactactgtcaacaggccgacagtttccctgtgacttttggccaggggaccaagctggagatcaaa

SEQ ID NO: 1173 - DNA, 321 bp, synthetic construct
  misc_feature 1..321: note = NK77.66_CD70_DB04_B07_VL_DNA
  source 1..321: mol_type = other DNA
gacatccagatgacccagtctccatcctccctgtctgcatctgtaggagacagagtcaccatcacttgccgggcaagtcagggcattagcaacaatttaaattggtatcagcagaaaccagggaaagcccctaagctcctgatctatcatgcatccaacttggagacgggggtcccatcaaggttcagtggcagtggatctgggacagatttcactctcaccatcagcagtctgcaacctgaagattttgcaacttactactgtcaacagagttacgacggccctatgacttttggccaggggaccaagctggagatcaaa

SEQ ID NO: 1174 - DNA, 336 bp, synthetic construct
  misc_feature 1..336: note = NK77.67_CD70_DB04_C01_VL_DNA
  source 1..336: mol_type = other DNA
gatattgtgatgactcagtctccactctccctgcccgtcacccctggagagccggcctccatctcctgcaggtctagtcagagcctcctgcatagcaatggatacaactatttggattggtacctgcagaagccagggcagtctccacagctcctgatctatgatgcttctaatcttgagacaggggtccctgacaggttcagtggcagtggatcaggcacagattttacactgaaaatcagcagagtggaggctgaggatgttggggtttattactgcatgcaagggacgcattggcctcccacgttcggccaagggaccaaggtggaaatcaaa

SEQ ID NO: 1175 - DNA, 321 bp, synthetic construct
  misc_feature 1..321: note = NK77.68_CD70_DB04_C04_VL_DNA
  source 1..321: mol_type = other DNA
gacatccagatgacccagtctccatcctccctgtctgcatctgtaggagacagagtcaccatcacttgccaggcgagtcaggacattagcaactatttaaattggtatcagcagaaaccagggaaagcccctaagctcctgatctacgatgcatccaatttggaaacaggggtcccatcaaggttcagtggaagtggatctgggacagattttactctcaccatcagcagcctgcagcctgaagatttcgcaacatattactgtcaacagtcatatgatggacctatcaccttcggccaagggacacgactggagattaaa

SEQ ID NO: 1176 - DNA, 321 bp, synthetic construct
  misc_feature 1..321: note = NK77.69_CD70_DB04_C06_VL_DNA
  source 1..321: mol_type = other DNA
gacatccagatgacccagtctccatcctccctgtctgcatctgtaggagacagagtcaccatcacttgccgggcaagtcagagcattagcagctatttaaattggtatcagcagaaaccagggaaagcccctaagctcctgatctatgacgcatccaacttggaaacgggggtcccatcaaggttcagtggcagtggatctgggacagatttcactctcaccatcagcagtctgcaacctgaagattttgcaacttactactgtcaacagagttacaatacccctccaactttcggcggagggaccaaggtggagatcaaa

SEQ ID NO: 1177 - DNA, 321 bp, synthetic construct
  misc_feature 1..321: note = NK77.70_CD70_DB04_C07_VL_DNA
  source 1..321: mol_type = other DNA
gacatccagatgacccagtctccatcctccctgtctgcatctgtaggagacagagtcaccatcacttgccaggcaagtcaggacattagcaattatttaaattggtatcagcagaaaccagggaaagcccctaagctcctgatctatggtgcatccagtttgcaaagtggggtcccatcaaggttcagtggcagtggatctgggacagatttcactctcaccatcagcagtctgcaacctgaagattttgcaacttactactgtctgcaggatgcggcgacccctatcaccttcggccaagggacacgactggagattaaa

SEQ ID NO: 1178 - DNA, 321 bp, synthetic construct
  misc_feature 1..321: note = NK77.71_CD70_DB04_D02_VL_DNA
  source 1..321: mol_type = other DNA
gacatccagatgacccagtctccatcctccctgtctgcatctgtaggagacagagtcaccatcacttgccgggcaagtcagagcattggaaattggttagcctggtatcagcagaaaccagggaaagcccctaagctcctgatctatgacgcatccgatttggaaaccggggtcccatcaaggttcagtggcagtggatctgggacagatttcactctcaccatcagcagtctgcaacctgaagattttgcaacttactactgtcaacagagttacactaccccttggacgttcggccaagggaccaaggtggaaatcaaa

SEQ ID NO: 1179 - DNA, 336 bp, synthetic construct
  misc_feature 1..336: note = NK77.72_CD70_DB04_D05_VL_DNA
  source 1..336: mol_type = other DNA
gatattgtgatgactcagtctccactctccctgcccgtcacccctggagagccggcctccatctcctgcaggtctagtcagagcctcttgcattctaatggctacaactatttggattggtacctgcagaagccagggcagtctccacagctcctgatctatgaagtctctaatcgggcctccggggtccctgacaggttcagtggcagtggatcaggcacagattttacactgaaaatcagcagagtggaggctgaggatgttggggtttattactgcatgaaaggcctacaaactcctctgactttcggccctgggaccaaagtggatatcaaa

SEQ ID NO: 1180 - DNA, 321 bp, synthetic construct
  misc_feature 1..321: note = NK77.73_CD70_DB04_D07_VL_DNA
  source 1..321: mol_type = other DNA
gacatccagatgacccagtctccatcctccctgtctgcatctgtaggagacagagtcaccatcacttgccgggcaagtcagggcattagcaactatttagcctggtatcagcagaaaccagggaaagcccctaagctcctgatctatgctgcatccagtttgcaaagtggggtcccatcaaggttcagtggcagtggatctgggacagatttcactctcaccatcagcagtctgcaacctgaagattttgcaacttactactgtcaacagagtcacagtacccctctcactttcggccaagggaccaaggtggagatcaaa

SEQ ID NO: 1181 - DNA, 321 bp, synthetic construct
  misc_feature 1..321: note = NK77.74_CD70_DB04_D08_VL_DNA
  source 1..321: mol_type = other DNA
gacatccagatgacccagtctccatcctccctgtctgcatctgtaggagacagagtcaccatcacttgccgggcaagtcaggggattagcaataacttaaattggtatcagcagaaaccagggaaagcccctaagctcctgatctatgatgcatccaacttggaaactggggtcccatcaaggttcagtggcagtggatctgggacagatttcactctcaccatcagcagtctgcaacctgaagattttgcaacttactactgtcaacagagttacagtaccccttatacgttcggccaagggaccaaggtggaaatcaaa

SEQ ID NO: 1182 - DNA, 321 bp, synthetic construct
  misc_feature 1..321: note = NK77.75_CD70_DB04_D10_VL_DNA
  source 1..321: mol_type = other DNA
gatatccagatgacccagtctccatcctccctgtctgcatctgtaggagacagagtcaccatcacttgccgggcaagtcaggacattggaaatgatttaggctggtatcagcagaaaccagggaaagcccctaagctcctgatctatgctgcatccagtttacaaagtggggtcccatcaaggttcagcggcagtggatctggcacagatttcactctcaccatcagcagcctgcagcctgaagattttgcaacttattactgtctacaagattacgactaccctctcactttcggccaggggaccaaggtggagatcaaa

SEQ ID NO: 1183 - DNA, 321 bp, synthetic construct
  misc_feature 1..321: note = NK77.85_CD70_DB03_B02_VL_DNA
  source 1..321: mol_type = other DNA
gacatccagatgacccagtctccatcctccctgtctgcatctgtaggagacagagtcaccatcacttgccgggcaagtcagagcattagcagctatttaaattggtatcagcagaaaccagggaaagcccctaagctcctgatctatgatgcatccaacttggagactggggtcccatcaaggttcagtggcagtggatctgggacagatttcactctcaccatcagcagtctgcaacctgaagattttgcaacttactactgtcaacagagttacaacaccccttacagttttggccaggggaccaaggtggagatcaaa

SEQ ID NO: 1184 - DNA, 321 bp, synthetic construct
  misc_feature 1..321: note = NK77.86_CD70_DB04_A06_VL_DNA
  source 1..321: mol_type = other DNA
gacatccagatgacccagtctccatcctccctgtctgcatctgtaggagacagagtcaccatcacttgccggacaagtcagagcattagcagctatttaaattggtatcagcagaaaccagggaaagcccctaagctcctgatctatgacgcatccaatttggaaaccggggtcccatcaaggttcagtggcagtggatctgggacagatttcactctcaccatcagcagtctgcaacctgaagattttgcaacttactactgtcttcaggactacagttaccctctcactttcggccaagggaccaaggtggagatcaaa

SEQ ID NO: 1185 - DNA, 321 bp, synthetic construct
  misc_feature 1..321: note = NK77.87_CD70_DB04_A09_VL_DNA
  source 1..321: mol_type = other DNA
gacatccagatgacccagtctccatcctccctgtctgcatctgtaggagacagagtcaccatcacttgccaggcaagtcaggacattagcaattatttaaattggtatcagcagaaaccagggaaagcccctaagctcctgatctatgatgcatccagtttgcaaagtggggtcccatcaaggttcagtggcagtggatctgggacagatttcactctcaccatcagcagtctgcaacctgaagattttgcaacttactactgtcaacagagttacagtacccctcccgccttcggccaagggaccaaggtggaaatcaaa

SEQ ID NO: 1186 - protein, 245 aa, synthetic construct
  REGION 1..245: note = NK71 scFv peptide sequence
QVTLKESGPVLVKPTETLTLTCTVSGFSLSNARMGVTWIRQPPGKALEWLAHIFSNDEKSYSTSLKSRLTISKDTSKTQVVLTMTNMDPVDTATYYCARIRDYYDISSYYDYWGQGTLVSVSSGGGGSGGGGSGGGGSDIQMTQSPSAMSASVGDRVTITCRASQDISNYLAWFQQKPGKVPKRLIYAASSLQSGVPSRFSGSGSGTEFTLTISSLLPEDFATYYCLQLNSFPFTFGGGTKVEIN

SEQ ID NO: 1187 - protein, 250 aa, synthetic construct
  REGION 1..250: note = NK72 scFv peptide sequence
EVQLVQSGAEVKKPGESLKISCKGSGYGFTSYWIGWVRQMPGKGLEWMGIIHPDDSDTKYSPSFQGQVTISADKSISTAYLQWSSLKASDTAMYYCASSYLRGLWGGYFDYWGQGTLVTVSSGGGGSGGGGSGGGGSELQSVLTQPPSASGTPGQRVTISCSGSSSNIGSNYVNWYQQLPGTAPKLLIYGDYQRPSGVPDRFSGSKSGTSASLAISGLRSEDEADYYCATRDDSLSGSVVFGTGTKLTVL

SEQ ID NO: 1188 - DNA, 612 bp, synthetic construct
  misc_feature 1..612: note = Membrane-bound human IL15 (mbIL15) DNA sequence
  source 1..612: mol_type = other DNA
atggccctcccagtaactgccctccttttgcccctcgcactccttcttcatgccgctcgccccaactgggtcaacgtgattagcgatttgaagaaaatcgaggaccttatacagtctatgcatattgacgctacactgtatactgagagtgatgtacacccgtcctgtaaggtaacggccatgaaatgctttcttctggagctccaggtcatcagcttggagtctggggacgcaagcatccacgatacggttgaaaacctcatcatccttgcgaacaactctctctcatctaatggaaacgttacagagagtgggtgtaaggagtgcgaagagttggaagaaaaaaacatcaaagaatttcttcaatccttcgttcacatagtgcaaatgttcattaacacgtccactaccacacccgccccgaggccacctacgccggcaccgactatcgccagtcaacccctctctctgcgccccgaggcttgccggcctgcggctggtggggcggtccacacccggggcctggattttgcgtgcgatatatacatctgggcacctcttgccggcacctgcggagtgctgcttctctcactcgttattacgctgtactgc

SEQ ID NO: 1189 - protein, 204 aa, synthetic construct
  REGION 1..204: note = Membrane-bound human IL15 (mbIL15) peptide sequence
MALPVTALLLPLALLLHAARPNWVNVISDLKKIEDLIQSMHIDATLYTESDVHPSCKVTAMKCFLLELQVISLESGDASIHDTVENLIILANNSLSSNGNVTESGCKECEELEEKNIKEFLQSFVHIVQMFINTSTTTPAPRPPTPAPTIASQPLSLRPEACRPAAGGAVHTRGLDFACDIYIWAPLAGTCGVLLLSLVITLYC

SEQ ID NO: 1190 - DNA, 20 bp, synthetic construct
  misc_feature 1..20: note = SMAD3 guide RNA 1
  source 1..20: mol_type = other DNA
ccgatcgtgaagcgcctgct

SEQ ID NO: 1191 - DNA, 20 bp, synthetic construct
  misc_feature 1..20: note = SMAD3 guide RNA 2
  source 1..20: mol_type = other DNA
cgagaaggcggtcaagagcc

SEQ ID NO: 1192 - DNA, 20 bp, synthetic construct
  misc_feature 1..20: note = SMAD3 guide RNA 3
  source 1..20: mol_type = other DNA
cttggtgttgacgttctgcg

SEQ ID NO: 1193 - DNA, 20 bp, synthetic construct
  misc_feature 1..20: note = MAPKAPK guide RNA 1
  source 1..20: mol_type = other DNA
ctctgctgtttcaccatcca

SEQ ID NO: 1194 - DNA, 20 bp, synthetic construct
  misc_feature 1..20: note = MAPKAPK guide RNA 2
  source 1..20: mol_type = other DNA
cccggcttgggcggtgctcc

SEQ ID NO: 1195 - DNA, 20 bp, synthetic construct
  misc_feature 1..20: note = MAPKAPK guide RNA 3
  source 1..20: mol_type = other DNA
cgactaccagttgtccaagc

SEQ ID NO: 1196 - DNA, 20 bp, synthetic construct
  misc_feature 1..20: note = CEACAM1 guide RNA 1
  source 1..20: mol_type = other DNA
gactgagttattggcgtggc

SEQ ID NO: 1197 - DNA, 20 bp, synthetic construct
  misc_feature 1..20: note = CEACAM1 guide RNA 2
  source 1..20: mol_type = other DNA
gaatgttccattgataagcc

SEQ ID NO: 1198 - DNA, 20 bp, synthetic construct
  misc_feature 1..20: note = CEACAM1 guide RNA 3
  source 1..20: mol_type = other DNA
gagaggctgaggtttgcccc

SEQ ID NO: 1199 - DNA, 20 bp, synthetic construct
  misc_feature 1..20: note = DDIT4 guide RNA 1
  source 1..20: mol_type = other DNA
cctcaccatgcctagccttt

SEQ ID NO: 1200 - DNA, 20 bp, synthetic construct
  misc_feature 1..20: note = DDIT4 guide RNA 2
  source 1..20: mol_type = other DNA
cgatctggggtgggagttcg

SEQ ID NO: 1201 - DNA, 20 bp, synthetic construct
  misc_feature 1..20: note = DDIT4 guide RNA 3
  source 1..20: mol_type = other DNA
gtttgaccgctccacgagcc

SEQ ID NO: 1202 - skipped

SEQ ID NO: 1203 - protein, 13 aa, synthetic construct
  REGION 1..13: note = CDR-H2 consensus sequence 1
  SITE 2: note = MISC_FEATURE - G, I, V, W
  SITE 3: note = MISC_FEATURE - I, M
  SITE 4: note = MISC_FEATURE - I, N, S
  SITE 5: note = MISC_FEATURE - A, P
  SITE 6: note = MISC_FEATURE - I, N, S, Y
  SITE 7: note = MISC_FEATURE - F, G, N, S
  SITE 9: note = MISC_FEATURE - A, D, G, H, N, S, T
  SITE 10: note = MISC_FEATURE - A, T
  SITE 11: note = MISC_FEATURE - G, I, N, S
GXXXXXXGXXXYA

SEQ ID NO: 1204 - skipped

SEQ ID NO: 1205 - protein, 11 aa, synthetic construct
  REGION 1..11: note = CDR-L1 consensus sequence 1
  SITE 1: note = MISC_FEATURE - Q, R
  SITE 5: note = MISC_FEATURE - D, G, S, T
  SITE 6: note = MISC_FEATURE - I, V
  SITE 7: note = MISC_FEATURE - G, R, S
  SITE 8: note = MISC_FEATURE - N, R, S
  SITE 9: note = MISC_FEATURE - F, W, Y
  SITE 11: note = MISC_FEATURE - A, N
XASQXXXXXLX

SEQ ID NO: 1206-1213 - skipped (8 entries)

SEQ ID NO: 1214 - RNA, 23 nt, synthetic construct
  misc_feature 1..23: note = CD70 guide RNA 1 as RNA
  source 1..23: mol_type = other RNA
tcaccaagcccgcgaccaatggg
